United States Patent Application Publication US 2020/0123570 A1 - sequence listing, part 2

SEQ ID NO: 7944 - DNA, 20 bp, Artificial Sequence
  Description of Artificial Sequence: Synthetic oligonucleotide
  Target: APOC3; (-) strand; PAM type: NRG; PAM sequence: CAG
taattcaaaaacctctcaaa

SEQ ID NO: 7945 - DNA, 20 bp, Artificial Sequence
  Description of Artificial Sequence: Synthetic oligonucleotide
  Target: APOC3; (-) strand; PAM type: NRG; PAM sequence: GAG
gggtgcaagtgaagcgcttg

SEQ ID NO: 7946 - DNA, 20 bp, Artificial Sequence
  Description of Artificial Sequence: Synthetic oligonucleotide
  Target: APOC3; (-) strand; PAM type: NRG; PAM sequence: TGG
ccgggtgcaagtgaagcgct

SEQ ID NO: 7947 - DNA, 20 bp, Artificial Sequence
  Description of Artificial Sequence: Synthetic oligonucleotide
  Target: APOC3; (-) strand; PAM type: NRG; PAM sequence: AAG
tttggtcccgggtgcaagtg

SEQ ID NO: 7948 - DNA, 20 bp, Artificial Sequence
  Description of Artificial Sequence: Synthetic oligonucleotide
  Target: APOC3; (-) strand; PAM type: NRG; PAM sequence: AAG
tggggtttggtcccgggtgc

SEQ ID NO: 7949 - DNA, 20 bp, Artificial Sequence
  Description of Artificial Sequence: Synthetic oligonucleotide
  Target: APOC3; (-) strand; PAM type: NRG; PAM sequence: GGG
tgggattggggtttggtccc

SEQ ID NO: 7950 - DNA, 20 bp, Artificial Sequence
  Description of Artificial Sequence: Synthetic oligonucleotide
  Target: APOC3; (-) strand; PAM type: NRG; PAM sequence: CGG
ctgggattggggtttggtcc

SEQ ID NO: 7951 - DNA, 20 bp, Artificial Sequence
  Description of Artificial Sequence: Synthetic oligonucleotide
  Target: APOC3; (-) strand; PAM type: NRG; PAM sequence: TGG
cagccactgggattggggtt

SEQ ID NO: 7952 - DNA, 20 bp, Artificial Sequence
  Description of Artificial Sequence: Synthetic oligonucleotide
  Target: APOC3; (-) strand; PAM type: NRG; PAM sequence: GGG
ggagccagccactgggattg

SEQ ID NO: 7953 - DNA, 20 bp, Artificial Sequence
  Description of Artificial Sequence: Synthetic oligonucleotide
  Target: APOC3; (-) strand; PAM type: NRG; PAM sequence: GGG
gggagccagccactgggatt

SEQ ID NO: 7954 - DNA, 20 bp, Artificial Sequence
  Description of Artificial Sequence: Synthetic oligonucleotide
  Target: APOC3; (-) strand; PAM type: NRG; PAM sequence: TGG
agggagccagccactgggat

SEQ ID NO: 7955 - DNA, 20 bp, Artificial Sequence
  Description of Artificial Sequence: Synthetic oligonucleotide
  Target: APOC3; (-) strand; PAM type: NRG; PAM sequence: GGG
gcctcagggagccagccact

SEQ ID NO: 7956 - DNA, 20 bp, Artificial Sequence
  Description of Artificial Sequence: Synthetic oligonucleotide
  Target: APOC3; (-) strand; PAM type: NRG; PAM sequence: TGG
ggcctcagggagccagccac

SEQ ID NO: 7957 - DNA, 20 bp, Artificial Sequence
  Description of Artificial Sequence: Synthetic oligonucleotide
  Target: APOC3; (-) strand; PAM type: NRG; PAM sequence: CAG
gcggggcggcctcagggagc

SEQ ID NO: 7958 - DNA, 20 bp, Artificial Sequence
  Description of Artificial Sequence: Synthetic oligonucleotide
  Target: APOC3; (-) strand; PAM type: NRG; PAM sequence: GAG
cggagcggggcggcctcagg

SEQ ID NO: 7959 - DNA, 20 bp, Artificial Sequence
  Description of Artificial Sequence: Synthetic oligonucleotide
  Target: APOC3; (-) strand; PAM type: NRG; PAM sequence: GGG
gacggagcggggcggcctca

SEQ ID NO: 7960 - DNA, 20 bp, Artificial Sequence
  Description of Artificial Sequence: Synthetic oligonucleotide
  Target: APOC3; (-) strand; PAM type: NRG; PAM sequence: AGG
ggacggagcggggcggcctc

SEQ ID NO: 7961 - DNA, 20 bp, Artificial Sequence
  Description of Artificial Sequence: Synthetic oligonucleotide
  Target: APOC3; (-) strand; PAM type: NRG; PAM sequence: CAG
gggacggagcggggcggcct

SEQ ID NO: 7962 - DNA, 20 bp, Artificial Sequence
  Description of Artificial Sequence: Synthetic oligonucleotide
  Target: APOC3; (-) strand; PAM type: NRG; PAM sequence: CGG
cggggcgggacggagcgggg

SEQ ID NO: 7963 - DNA, 20 bp, Artificial Sequence
  Description of Artificial Sequence: Synthetic oligonucleotide
  Target: APOC3; (-) strand; PAM type: NRG; PAM sequence: GGG
cagcggggcgggacggagcg

SEQ ID NO: 7964 - DNA, 20 bp, Artificial Sequence
  Description of Artificial Sequence: Synthetic oligonucleotide
  Target: APOC3; (-) strand; PAM type: NRG; PAM sequence: GGG
tcagcggggcgggacggagc

SEQ ID NO: 7965 - DNA, 20 bp, Artificial Sequence
  Description of Artificial Sequence: Synthetic oligonucleotide
  Target: APOC3; (-) strand; PAM type: NRG; PAM sequence: CGG
gtcagcggggcgggacggag

SEQ ID NO: 7966 - DNA, 20 bp, Artificial Sequence
  Description of Artificial Sequence: Synthetic oligonucleotide
  Target: APOC3; (-) strand; PAM type: NRG; PAM sequence: GAG
gctgtcagcggggcgggacg

SEQ ID NO: 7967 - DNA, 20 bp, Artificial Sequence
  Description of Artificial Sequence: Synthetic oligonucleotide
  Target: APOC3; (-) strand; PAM type: NRG; PAM sequence: CGG
ccgctgtcagcggggcggga

SEQ ID NO: 7968 - DNA, 20 bp, Artificial Sequence
  Description of Artificial Sequence: Synthetic oligonucleotide
  Target: APOC3; (-) strand; PAM type: NRG; PAM sequence: GGG
ccagccgctgtcagcggggc

SEQ ID NO: 7969 - DNA, 20 bp, Artificial Sequence
  Description of Artificial Sequence: Synthetic oligonucleotide
  Target: APOC3; (-) strand; PAM type: NRG; PAM sequence: CGG
cccagccgctgtcagcgggg

SEQ ID NO: 7970 - DNA, 20 bp, Artificial Sequence
  Description of Artificial Sequence: Synthetic oligonucleotide
  Target: APOC3; (-) strand; PAM type: NRG; PAM sequence: GGG
cagcccagccgctgtcagcg

SEQ ID NO: 7971 - DNA, 20 bp, Artificial Sequence
  Description of Artificial Sequence: Synthetic oligonucleotide
  Target: APOC3; (-) strand; PAM type: NRG; PAM sequence: GGG
ccagcccagccgctgtcagc

SEQ ID NO: 7972 - DNA, 20 bp, Artificial Sequence
  Description of Artificial Sequence: Synthetic oligonucleotide
  Target: APOC3; (-) strand; PAM type: NRG; PAM sequence: CGG
tccagcccagccgctgtcag

SEQ ID NO: 7973 - DNA, 20 bp, Artificial Sequence
  Description of Artificial Sequence: Synthetic oligonucleotide
  Target: APOC3; (-) strand; PAM type: NRG; PAM sequence: CAG
ttctccagcccagccgctgt

SEQ ID NO: 7974 - DNA, 20 bp, Artificial Sequence
  Description of Artificial Sequence: Synthetic oligonucleotide
  Target: APOC3; (-) strand; PAM type: NRG; PAM sequence: CAG
gtatagagccttctccagcc

SEQ ID NO: 7975 - DNA, 20 bp, Artificial Sequence
  Description of Artificial Sequence: Synthetic oligonucleotide
  Target: APOC3; (-) strand; PAM type: NRG; PAM sequence: CAG
tgtccgtatagagccttctc

SEQ ID NO: 7976 - DNA, 20 bp, Artificial Sequence
  Description of Artificial Sequence: Synthetic oligonucleotide
  Target: APOC3; (-) strand; PAM type: NRG; PAM sequence: GAG
cccagaggtgtgtccgtata

SEQ ID NO: 7977 - DNA, 20 bp, Artificial Sequence
  Description of Artificial Sequence: Synthetic oligonucleotide
  Target: APOC3; (-) strand; PAM type: NRG; PAM sequence: TAG
tccccagaggtgtgtccgta

SEQ ID NO: 7978 - DNA, 20 bp, Artificial Sequence
  Description of Artificial Sequence: Synthetic oligonucleotide
  Target: APOC3; (-) strand; PAM type: NRG; PAM sequence: AGG
agtgggttccccgtccccag

SEQ ID NO: 7979 - DNA, 20 bp, Artificial Sequence
  Description of Artificial Sequence: Synthetic oligonucleotide
  Target: APOC3; (-) strand; PAM type: NRG; PAM sequence: GAG
cagtgggttccccgtcccca

SEQ ID NO: 7980 - DNA, 20 bp, Artificial Sequence
  Description of Artificial Sequence: Synthetic oligonucleotide
  Target: APOC3; (-) strand; PAM type: NRG; PAM sequence: CAG
agcagtgggttccccgtccc

SEQ ID NO: 7981 - DNA, 20 bp, Artificial Sequence
  Description of Artificial Sequence: Synthetic oligonucleotide
  Target: APOC3; (-) strand; PAM type: NRG; PAM sequence: GGG
ttgctttagctgggagcagt

SEQ ID NO: 7982 - DNA, 20 bp, Artificial Sequence
  Description of Artificial Sequence: Synthetic oligonucleotide
  Target: APOC3; (-) strand; PAM type: NRG; PAM sequence: TGG
gttgctttagctgggagcag

SEQ ID NO: 7983 - DNA, 20 bp, Artificial Sequence
  Description of Artificial Sequence: Synthetic oligonucleotide
  Target: APOC3; (-) strand; PAM type: NRG; PAM sequence: CAG
agggttgctttagctgggag

SEQ ID NO: 7984 - DNA, 20 bp, Artificial Sequence
  Description of Artificial Sequence: Synthetic oligonucleotide
  Target: APOC3; (-) strand; PAM type: NRG; PAM sequence: GAG
aacagggttgctttagctgg

SEQ ID NO: 7985 - DNA, 20 bp, Artificial Sequence
  Description of Artificial Sequence: Synthetic oligonucleotide
  Target: APOC3; (-) strand; PAM type: NRG; PAM sequence: GGG
gaaacagggttgctttagct

SEQ ID NO: 7986 - DNA, 20 bp, Artificial Sequence
  Description of Artificial Sequence: Synthetic oligonucleotide
  Target: APOC3; (-) strand; PAM type: NRG; PAM sequence: TGG
ggaaacagggttgctttagc

SEQ ID NO: 7987 - DNA, 20 bp, Artificial Sequence
  Description of Artificial Sequence: Synthetic oligonucleotide
  Target: APOC3; (-) strand; PAM type: NRG; PAM sequence: TAG
gccaggaaacagggttgctt

SEQ ID NO: 7988 - DNA, 20 bp, Artificial Sequence
  Description of Artificial Sequence: Synthetic oligonucleotide
  Target: APOC3; (-) strand; PAM type: NRG; PAM sequence: GGG
ctgaggcgggccaggaaaca

SEQ ID NO: 7989 - DNA, 20 bp, Artificial Sequence
  Description of Artificial Sequence: Synthetic oligonucleotide
  Target: APOC3; (-) strand; PAM type: NRG; PAM sequence: AGG
tctgaggcgggccaggaaac

SEQ ID NO: 7990 - DNA, 20 bp, Artificial Sequence
  Description of Artificial Sequence: Synthetic oligonucleotide
  Target: APOC3; (-) strand; PAM type: NRG; PAM sequence: CAG
gtctgaggcgggccaggaaa

SEQ ID NO: 7991 - DNA, 20 bp, Artificial Sequence
  Description of Artificial Sequence: Synthetic oligonucleotide
  Target: APOC3; (-) strand; PAM type: NRG; PAM sequence: AGG
agccctgtctgaggcgggcc

SEQ ID NO: 7992 - DNA, 20 bp, Artificial Sequence
  Description of Artificial Sequence: Synthetic oligonucleotide
  Target: APOC3; (-) strand; PAM type: NRG; PAM sequence: CAG
cagccctgtctgaggcgggc

SEQ ID NO: 7993 - DNA, 20 bp, Artificial Sequence
  Description of Artificial Sequence: Synthetic oligonucleotide
  Target: APOC3; (-) strand; PAM type: NRG; PAM sequence: GGG
cctgcagccctgtctgaggc

SEQ ID NO: 7994 - DNA, 20 bp, Artificial Sequence
  Description of Artificial Sequence: Synthetic oligonucleotide
  Target: APOC3; (-) strand; PAM type: NRG; PAM sequence: CGG
gcctgcagccctgtctgagg

SEQ ID NO: 7995 - DNA, 20 bp, Artificial Sequence
  Description of Artificial Sequence: Synthetic oligonucleotide
  Target: APOC3; (-) strand; PAM type: NRG; PAM sequence: AGG
aaggcctgcagccctgtctg

SEQ ID NO: 7996 - DNA, 20 bp, Artificial Sequence
  Description of Artificial Sequence: Synthetic oligonucleotide
  Target: APOC3; (-) strand; PAM type: NRG; PAM sequence: GAG
caaggcctgcagccctgtct

SEQ ID NO: 7997 - DNA, 20 bp, Artificial Sequence
  Description of Artificial Sequence: Synthetic oligonucleotide
  Target: APOC3; (-) strand; PAM type: NRG; PAM sequence: CAG
aggggctcaaacaaggcctg

SEQ ID NO: 7998 - DNA, 20 bp, Artificial Sequence
  Description of Artificial Sequence: Synthetic oligonucleotide
  Target: APOC3; (-) strand; PAM type: NRG; PAM sequence: AGG
ccctgaaaggggctcaaaca

SEQ ID NO: 7999 - DNA, 20 bp, Artificial Sequence
  Description of Artificial Sequence: Synthetic oligonucleotide
  Target: APOC3; (-) strand; PAM type: NRG; PAM sequence: AAG
gccctgaaaggggctcaaac

SEQ ID NO: 8000 - DNA, 20 bp, Artificial Sequence
  Description of Artificial Sequence: Synthetic oligonucleotide
  Target: APOC3; (-) strand; PAM type: NRG; PAM sequence: GGG
aaggccaggtgccctgaaag

SEQ ID NO: 8001 - DNA, 20 bp, Artificial Sequence
  Description of Artificial Sequence: Synthetic oligonucleotide
  Target: APOC3; (-) strand; PAM type: NRG; PAM sequence: GGG
caaggccaggtgccctgaaa

SEQ ID NO: 8002 - DNA, 20 bp, Artificial Sequence
  Description of Artificial Sequence: Synthetic oligonucleotide
  Target: APOC3; (-) strand; PAM type: NRG; PAM sequence: AGG
ccaaggccaggtgccctgaa

SEQ ID NO: 8003 - DNA, 20 bp, Artificial Sequence
  Description of Artificial Sequence: Synthetic oligonucleotide
  Target: APOC3; (-) strand; PAM type: NRG; PAM sequence: AAG
tccaaggccaggtgccctga

SEQ ID NO: 8004 - DNA, 20 bp, Artificial Sequence
  Description of Artificial Sequence: Synthetic oligonucleotide
  Target: APOC3; (-) strand; PAM type: NRG; PAM sequence: AGG
gccacagacaatccaaggcc

SEQ ID NO: 8005 - DNA, 20 bp, Artificial Sequence
  Description of Artificial Sequence: Synthetic oligonucleotide
  Target: APOC3; (-) strand; PAM type: NRG; PAM sequence: CAG
agccacagacaatccaaggc

SEQ ID NO: 8006 - DNA, 20 bp, Artificial Sequence
  Description of Artificial Sequence: Synthetic oligonucleotide
  Target: APOC3; (-) strand; PAM type: NRG; PAM sequence: AGG
gcaaagccacagacaatcca

SEQ ID NO: 8007 - DNA, 20 bp, Artificial Sequence
  Description of Artificial Sequence: Synthetic oligonucleotide
  Target: APOC3; (-) strand; PAM type: NRG; PAM sequence: AAG
ggcaaagccacagacaatcc

SEQ ID NO: 8008 - DNA, 20 bp, Artificial Sequence
  Description of Artificial Sequence: Synthetic oligonucleotide
  Target: APOC3; (-) strand; PAM type: NRG; PAM sequence: CAG
cagcggaccaggcaaagcca

SEQ ID NO: 8009 - DNA, 20 bp, Artificial Sequence
  Description of Artificial Sequence: Synthetic oligonucleotide
  Target: APOC3; (-) strand; PAM type: NRG; PAM sequence: AAG
aagtcacagcggaccaggca

SEQ ID NO: 8010 - DNA, 20 bp, Artificial Sequence
  Description of Artificial Sequence: Synthetic oligonucleotide
  Target: APOC3; (-) strand; PAM type: NRG; PAM sequence: AGG
aaaggaagtcacagcggacc

SEQ ID NO: 8011 - DNA, 20 bp, Artificial Sequence
  Description of Artificial Sequence: Synthetic oligonucleotide
  Target: APOC3; (-) strand; PAM type: NRG; PAM sequence: CAG
gaaaggaagtcacagcggac

SEQ ID NO: 8012 - DNA, 20 bp, Artificial Sequence
  Description of Artificial Sequence: Synthetic oligonucleotide
  Target: APOC3; (-) strand; PAM type: NRG; PAM sequence: CGG
aagtagaaaggaagtcacag

SEQ ID NO: 8013 - DNA, 20 bp, Artificial Sequence
  Description of Artificial Sequence: Synthetic oligonucleotide
  Target: APOC3; (-) strand; PAM type: NRG; PAM sequence: CAG
ctcaagtagaaaggaagtca

SEQ ID NO: 8014 - DNA, 20 bp, Artificial Sequence
  Description of Artificial Sequence: Synthetic oligonucleotide
  Target: APOC3; (-) strand; PAM type: NRG; PAM sequence: AAG
gcaaggctcaagtagaaagg

SEQ ID NO: 8015 - DNA, 20 bp, Artificial Sequence
  Description of Artificial Sequence: Synthetic oligonucleotide
  Target: APOC3; (-) strand; PAM type: NRG; PAM sequence: AGG
ttagcaaggctcaagtagaa

SEQ ID NO: 8016 - DNA, 20 bp, Artificial Sequence
  Description of Artificial Sequence: Synthetic oligonucleotide
  Target: APOC3; (-) strand; PAM type: NRG; PAM sequence: AAG
cttagcaaggctcaagtaga

SEQ ID NO: 8017 - DNA, 20 bp, Artificial Sequence
  Description of Artificial Sequence: Synthetic oligonucleotide
  Target: APOC3; (-) strand; PAM type: NRG; PAM sequence: TAG
ctgccttagcaaggctcaag

SEQ ID NO: 8018 - DNA, 20 bp, Artificial Sequence
  Description of Artificial Sequence: Synthetic oligonucleotide
  Target: APOC3; (-) strand; PAM type: NRG; PAM sequence: AAG
agtctgccttagcaaggctc

SEQ ID NO: 8019 - DNA, 20 bp, Artificial Sequence
  Description of Artificial Sequence: Synthetic oligonucleotide
  Target: APOC3; (-) strand; PAM type: NRG; PAM sequence: AGG
gagtagagtctgccttagca

SEQ ID NO: 8020 - DNA, 20 bp, Artificial Sequence
  Description of Artificial Sequence: Synthetic oligonucleotide
  Target: APOC3; (-) strand; PAM type: NRG; PAM sequence: AAG
ggagtagagtctgccttagc

SEQ ID NO: 8021 - DNA, 20 bp, Artificial Sequence
  Description of Artificial Sequence: Synthetic oligonucleotide
  Target: APOC3; (-) strand; PAM type: NRG; PAM sequence: TAG
tgagggagtagagtctgcct

SEQ ID NO: 8022 - DNA, 20 bp, Artificial Sequence
  Description of Artificial Sequence: Synthetic oligonucleotide
  Target: APOC3; (-) strand; PAM type: NRG; PAM sequence: GAG
tgcttacgagtgagggagta

SEQ ID NO: 8023 - DNA, 20 bp, Artificial Sequence
  Description of Artificial Sequence: Synthetic oligonucleotide
  Target: APOC3; (-) strand; PAM type: NRG; PAM sequence: TAG
gctgcttacgagtgagggag

SEQ ID NO: 8024 - DNA, 20 bp, Artificial Sequence
  Description of Artificial Sequence: Synthetic oligonucleotide
  Target: APOC3; (-) strand; PAM type: NRG; PAM sequence: GAG
ctggctgcttacgagtgagg

SEQ ID NO: 8025 - DNA, 20 bp, Artificial Sequence
  Description of Artificial Sequence: Synthetic oligonucleotide
  Target: APOC3; (-) strand; PAM type: NRG; PAM sequence: GGG
gcctggctgcttacgagtga

SEQ ID NO: 8026 - DNA, 20 bp, Artificial Sequence
  Description of Artificial Sequence: Synthetic oligonucleotide
  Target: APOC3; (-) strand; PAM type: NRG; PAM sequence: AGG
cgcctggctgcttacgagtg

SEQ ID NO: 8027 - DNA, 20 bp, Artificial Sequence
  Description of Artificial Sequence: Synthetic oligonucleotide
  Target: APOC3; (-) strand; PAM type: NRG; PAM sequence: GAG
acgcctggctgcttacgagt

SEQ ID NO: 8028 - DNA, 20 bp, Artificial Sequence
  Description of Artificial Sequence: Synthetic oligonucleotide
  Target: APOC3; (-) strand; PAM type: NRG; PAM sequence: GAG
ctggacgcctggctgcttac

SEQ ID NO: 8029 - DNA, 20 bp, Artificial Sequence
  Description of Artificial Sequence: Synthetic oligonucleotide
  Target: APOC3; (-) strand; PAM type: NRG; PAM sequence: TGG
tggaggacctgctggacgcc

SEQ ID NO: 8030 - DNA, 20 bp, Artificial Sequence
  Description of Artificial Sequence: Synthetic oligonucleotide
  Target: APOC3; (-) strand; PAM type: NRG; PAM sequence: TGG
atcgacgttggaggacctgc

SEQ ID NO: 8031 - DNA, 20 bp, Artificial Sequence
  Description of Artificial Sequence: Synthetic oligonucleotide
  Target: APOC3; (-) strand; PAM type: NRG; PAM sequence: AGG
agggccaagatcgacgttgg

SEQ ID NO: 8032 - DNA, 20 bp, Artificial Sequence
  Description of Artificial Sequence: Synthetic oligonucleotide
  Target: APOC3; (-) strand; PAM type: NRG; PAM sequence: GAG
tagggccaagatcgacgttg

SEQ ID NO: 8033 - DNA, 20 bp, Artificial Sequence
  Description of Artificial Sequence: Synthetic oligonucleotide
  Target: APOC3; (-) strand; PAM type: NRG; PAM sequence: TGG
cttagggccaagatcgacgt

SEQ ID NO: 8034 - DNA, 20 bp, Artificial Sequence
  Description of Artificial Sequence: Synthetic oligonucleotide
  Target: APOC3; (-) strand; PAM type: NRG; PAM sequence: AAG
agactggacgtcttagggcc

SEQ ID NO: 8035 - DNA, 20 bp, Artificial Sequence
  Description of Artificial Sequence: Synthetic oligonucleotide
  Target: APOC3; (-) strand; PAM type: NRG; PAM sequence: GGG
tgcccagactggacgtctta

SEQ ID NO: 8036 - DNA, 20 bp, Artificial Sequence
  Description of Artificial Sequence: Synthetic oligonucleotide
  Target: APOC3; (-) strand; PAM type: NRG; PAM sequence: AGG
gtgcccagactggacgtctt

SEQ ID NO: 8037 - DNA, 20 bp, Artificial Sequence
  Description of Artificial Sequence: Synthetic oligonucleotide
  Target: APOC3; (-) strand; PAM type: NRG; PAM sequence: TAG
cgtgcccagactggacgtct

SEQ ID NO: 8038 - DNA, 20 bp, Artificial Sequence
  Description of Artificial Sequence: Synthetic oligonucleotide
  Target: APOC3; (-) strand; PAM type: NRG; PAM sequence: TGG
caacaactccgtgcccagac

SEQ ID NO: 8039 - DNA, 20 bp, Artificial Sequence
  Description of Artificial Sequence: Synthetic oligonucleotide
  Target: APOC3; (-) strand; PAM type: NRG; PAM sequence: CAG
gatctcaacaactccgtgcc

SEQ ID NO: 8040 - DNA, 20 bp, Artificial Sequence
  Description of Artificial Sequence: Synthetic oligonucleotide
  Target: APOC3; (-) strand; PAM type: NRG; PAM sequence: CGG
ctggagcagggacttcctgc

SEQ ID NO: 8041 - DNA, 20 bp, Artificial Sequence
  Description of Artificial Sequence: Synthetic oligonucleotide
  Target: APOC3; (-) strand; PAM type: NRG; PAM sequence: GGG
gggcctttggccctggagca

SEQ ID NO: 8042 - DNA, 20 bp, Artificial Sequence
  Description of Artificial Sequence: Synthetic oligonucleotide
  Target: APOC3; (-) strand; PAM type: NRG; PAM sequence: AGG
ggggcctttggccctggagc

SEQ ID NO: 8043 - DNA, 20 bp, Artificial Sequence
  Description of Artificial Sequence: Synthetic oligonucleotide
  Target: APOC3; (-) strand; PAM type: NRG; PAM sequence: CAG
tggggcctttggccctggag

SEQ ID NO: 8044 - DNA, 20 bp, Artificial Sequence
  Description of Artificial Sequence: Synthetic oligonucleotide
  Target: APOC3; (-) strand; PAM type: NRG; PAM sequence: GAG
gggtggggcctttggccctg

SEQ ID NO: 8045 - DNA, 20 bp, Artificial Sequence
  Description of Artificial Sequence: Synthetic oligonucleotide
  Target: APOC3; (-) strand; PAM type: NRG; PAM sequence: TGG
ccgggtggggcctttggccc

SEQ ID NO: 8046 - DNA, 20 bp, Artificial Sequence
  Description of Artificial Sequence: Synthetic oligonucleotide
  Target: APOC3; (-) strand; PAM type: NRG; PAM sequence: TGG
gggagcccgggtggggcctt

SEQ ID NO: 8047 - DNA, 20 bp, Artificial Sequence
  Description of Artificial Sequence: Synthetic oligonucleotide
  Target: APOC3; (-) strand; PAM type: NRG; PAM sequence: GGG
catccgggggagcccgggtg

SEQ ID NO: 8048 - DNA, 20 bp, Artificial Sequence
  Description of Artificial Sequence: Synthetic oligonucleotide
  Target: APOC3; (-) strand; PAM type: NRG; PAM sequence: GGG
acatccgggggagcccgggt

SEQ ID NO: 8049 - DNA, 20 bp, Artificial Sequence
  Description of Artificial Sequence: Synthetic oligonucleotide
  Target: APOC3; (-) strand; PAM type: NRG; PAM sequence: TGG
gacatccgggggagcccggg

SEQ ID NO: 8050 - DNA, 20 bp, Artificial Sequence
  Description of Artificial Sequence: Synthetic oligonucleotide
  Target: APOC3; (-) strand; PAM type: NRG; PAM sequence: GGG
ggggacatccgggggagccc

SEQ ID NO: 8051 - DNA, 20 bp, Artificial Sequence
  Description of Artificial Sequence: Synthetic oligonucleotide
  Target: APOC3; (-) strand; PAM type: NRG; PAM sequence: CGG
cggggacatccgggggagcc

SEQ ID NO: 8052 - DNA, 20 bp, Artificial Sequence
  Description of Artificial Sequence: Synthetic oligonucleotide
  Target: APOC3; (-) strand; PAM type: NRG; PAM sequence: GAG
gggtgcggggacatccgggg

SEQ ID NO: 8053 - DNA, 20 bp, Artificial Sequence
  Description of Artificial Sequence: Synthetic oligonucleotide
  Target: APOC3; (-) strand; PAM type: NRG; PAM sequence: GGG
gggggtgcggggacatccgg

SEQ ID NO: 8054 - DNA, 20 bp, Artificial Sequence
  Description of Artificial Sequence: Synthetic oligonucleotide
  Target: APOC3; (-) strand; PAM type: NRG; PAM sequence: GGG
ggggggtgcggggacatccg

SEQ ID NO: 8055 - DNA, 20 bp, Artificial Sequence
  Description of Artificial Sequence: Synthetic oligonucleotide
  Target: APOC3; (-) strand; PAM type: NRG; PAM sequence: GGG
aggggggtgcggggacatcc

SEQ ID NO: 8056 - DNA, 20 bp, Artificial Sequence
  Description of Artificial Sequence: Synthetic oligonucleotide
  Target: APOC3; (-) strand; PAM type: NRG; PAM sequence: CGG
gaggggggtgcggggacatc

SEQ ID NO: 8057 - DNA, 20 bp, Artificial Sequence
  Description of Artificial Sequence: Synthetic oligonucleotide
  Target: APOC3; (-) strand; PAM type: NRG; PAM sequence: GGG
ggagaatagaggggggtgcg

SEQ ID NO: 8058 - DNA, 20 bp, Artificial Sequence
  Description of Artificial Sequence: Synthetic oligonucleotide
  Target: APOC3; (-) strand; PAM type: NRG; PAM sequence: GGG
gggagaatagaggggggtgc

SEQ ID NO: 8059 - DNA, 20 bp, Artificial Sequence
  Description of Artificial Sequence: Synthetic oligonucleotide
  Target: APOC3; (-) strand; PAM type: NRG; PAM sequence: CGG
tgggagaatagaggggggtg

SEQ ID NO: 8060 - DNA, 20 bp, Artificial Sequence
  Description of Artificial Sequence: Synthetic oligonucleotide
  Target: APOC3; (-) strand; PAM type: NRG; PAM sequence: GGG
tcttttgggagaatagaggg

SEQ ID NO: 8061 - DNA, 20 bp, Artificial Sequence
  Description of Artificial Sequence: Synthetic oligonucleotide
  Target: APOC3; (-) strand; PAM type: NRG; PAM sequence: GGG
ttcttttgggagaatagagg

SEQ ID NO: 8062 - DNA, 20 bp, Artificial Sequence
  Description of Artificial Sequence: Synthetic oligonucleotide
  Target: APOC3; (-) strand; PAM type: NRG; PAM sequence: GGG
tttcttttgggagaatagag

SEQ ID NO: 8063 - DNA, 20 bp, Artificial Sequence
  Description of Artificial Sequence: Synthetic oligonucleotide
  Target: APOC3; (-) strand; PAM type: NRG; PAM sequence: GGG
ctttcttttgggagaataga

SEQ ID NO: 8064 - DNA, 20 bp, Artificial Sequence
  Description of Artificial Sequence: Synthetic oligonucleotide
  Target: APOC3; (-) strand; PAM type: NRG; PAM sequence: AGG
tctttcttttgggagaatag

SEQ ID NO: 8065 - DNA, 20 bp, Artificial Sequence
  Description of Artificial Sequence: Synthetic oligonucleotide
  Target: APOC3; (-) strand; PAM type: NRG; PAM sequence: GAG
ttctttcttttgggagaata

SEQ ID NO: 8066 - DNA, 20 bp, Artificial Sequence
  Description of Artificial Sequence: Synthetic oligonucleotide
  Target: APOC3; (-) strand; PAM type: NRG; PAM sequence: TAG
gcttctttcttttgggagaa

SEQ ID NO: 8067 - DNA, 20 bp, Artificial Sequence
  Description of Artificial Sequence: Synthetic oligonucleotide
  Target: APOC3; (-) strand; PAM type: NRG; PAM sequence: GAG
aagcagcttctttcttttgg

SEQ ID NO: 8068 - DNA, 20 bp, Artificial Sequence
  Description of Artificial Sequence: Synthetic oligonucleotide
  Target: APOC3; (-) strand; PAM type: NRG; PAM sequence: GGG
ggaagcagcttctttctttt

SEQ ID NO: 8069 - DNA, 20 bp, Artificial Sequence
  Description of Artificial Sequence: Synthetic oligonucleotide
  Target: APOC3; (-) strand; PAM type: NRG; PAM sequence: TGG
gggaagcagcttctttcttt

SEQ ID NO: 8070 - DNA, 20 bp, Artificial Sequence
  Description of Artificial Sequence: Synthetic oligonucleotide
  Target: APOC3; (-) strand; PAM type: NRG; PAM sequence: CAG
aacgtttccaaagtgggaag

SEQ ID NO: 8071 - DNA, 20 bp, Artificial Sequence
  Description of Artificial Sequence: Synthetic oligonucleotide
  Target: APOC3; (-) strand; PAM type: NRG; PAM sequence: AAG
ataaacgtttccaaagtggg

SEQ ID NO: 8072 - DNA, 20 bp, Artificial Sequence
  Description of Artificial Sequence: Synthetic oligonucleotide
  Target: APOC3; (-) strand; PAM type: NRG; PAM sequence: GGG
agaataaacgtttccaaagt

SEQ ID NO: 8073 - DNA, 20 bp, Artificial Sequence
  Description of Artificial Sequence: Synthetic oligonucleotide
  Target: APOC3; (-) strand; PAM type: NRG; PAM sequence: TGG
cagaataaacgtttccaaag

SEQ ID NO: 8074 - DNA, 20 bp, Artificial Sequence
  Description of Artificial Sequence: Synthetic oligonucleotide
  Target: APOC3; (-) strand; PAM type: NRG; PAM sequence: AAG
gctcagaataaacgtttcca

SEQ ID NO: 8075 - DNA, 20 bp, Artificial Sequence
  Description of Artificial Sequence: Synthetic oligonucleotide
  Target: APOC3; (-) strand; PAM type: NRG; PAM sequence: CAG
ccgccccccttcccggtgct

SEQ ID NO: 8076 - DNA, 20 bp, Artificial Sequence
  Description of Artificial Sequence: Synthetic oligonucleotide
  Target: APOC3; (-) strand; PAM type: NRG; PAM sequence: CGG
cccgccgccgccccccttcc

SEQ ID NO: 8077 - DNA, 20 bp, Artificial Sequence
  Description of Artificial Sequence: Synthetic oligonucleotide
  Target: APOC3; (-) strand; PAM type: NRG; PAM sequence: AGG
aagaagctcaacacccagtg

SEQ ID NO: 8078 - DNA, 20 bp, Artificial Sequence
  Description of Artificial Sequence: Synthetic oligonucleotide
  Target: APOC3; (-) strand; PAM type: NRG; PAM sequence: GAG
taagaagctcaacacccagt

SEQ ID NO: 8079 - DNA, 20 bp, Artificial Sequence
  Description of Artificial Sequence: Synthetic oligonucleotide
  Target: APOC3; (-) strand; PAM type: NRG; PAM sequence: CAG
acactaagaagctcaacacc

SEQ ID NO: 8080 - DNA, 20 bp, Artificial Sequence
  Description of Artificial Sequence: Synthetic oligonucleotide
  Target: APOC3; (-) strand; PAM type: NRG; PAM sequence: AAG
ctctcgaggagtacactaag

SEQ ID NO: 8081 - DNA, 20 bp, Artificial Sequence
  Description of Artificial Sequence: Synthetic oligonucleotide
  Target: APOC3; (-) strand; PAM type: NRG; PAM sequence: AAG
gcgctctcgaggagtacact

SEQ ID NO: 8082 - DNA, 20 bp, Artificial Sequence
  Description of Artificial Sequence: Synthetic oligonucleotide
  Target: APOC3; (-) strand; PAM type: NRG; PAM sequence: GAG
gcttcctgagcgctctcgag

SEQ ID NO: 8083 - DNA, 20 bp, Artificial Sequence
  Description of Artificial Sequence: Synthetic oligonucleotide
  Target: APOC3; (-) strand; PAM type: NRG; PAM sequence: AGG
cagcttcctgagcgctctcg

SEQ ID NO: 8084 - DNA, 20 bp, Artificial Sequence
  Description of Artificial Sequence: Synthetic oligonucleotide
  Target: APOC3; (-) strand; PAM type: NRG; PAM sequence: GAG
tcagcttcctgagcgctctc

SEQ ID NO: 8085 - DNA, 20 bp, Artificial Sequence
  Description of Artificial Sequence: Synthetic oligonucleotide
  Target: APOC3; (-) strand; PAM type: NRG; PAM sequence: GAG
agcttcaaggtcagcttcct

SEQ ID NO: 8086 - DNA, 20 bp, Artificial Sequence
  Description of Artificial Sequence: Synthetic oligonucleotide
  Target: APOC3; (-) strand; PAM type: NRG; PAM sequence: CAG
gtgctggagagcttcaaggt

SEQ ID NO: 8087 - DNA, 20 bp, Artificial Sequence
  Description of Artificial Sequence: Synthetic oligonucleotide
  Target: APOC3; (-) strand; PAM type: NRG; PAM sequence: AGG
gcccgtgctggagagcttca

SEQ ID NO: 8088 - DNA, 20 bp, Artificial Sequence
  Description of Artificial Sequence: Synthetic oligonucleotide
  Target: APOC3; (-) strand; PAM type: NRG; PAM sequence: AAG
tgcccgtgctggagagcttc

SEQ ID NO: 8089 - DNA, 20 bp, Artificial Sequence
  Description of Artificial Sequence: Synthetic oligonucleotide
  Target: APOC3; (-) strand; PAM type: NRG; PAM sequence: GAG
ggcctgctgcccgtgctgga

SEQ ID NO: 8090 - DNA, 20 bp, Artificial Sequence
  Description of Artificial Sequence: Synthetic oligonucleotide
  Target: APOC3; (-) strand; PAM type: NRG; PAM sequence: GAG
aaggcctgctgcccgtgctg

SEQ ID NO: 8091 - DNA, 20 bp, Artificial Sequence
  Description of Artificial Sequence: Synthetic oligonucleotide
  Target: APOC3; (-) strand; PAM type: NRG; PAM sequence: TGG
ccaaggcctgctgcccgtgc

SEQ ID NO: 8092 - DNA, 20 bp, Artificial Sequence
  Description of Artificial Sequence: Synthetic oligonucleotide
  Target: APOC3; (-) strand; PAM type: NRG; PAM sequence: AGG
gcgctcgaggacctccgcca

SEQ ID NO: 8093 - DNA, 20 bp, Artificial Sequence
  Description of Artificial Sequence: Synthetic oligonucleotide
  Target: APOC3; (-) strand; PAM type: NRG; PAM sequence: AAG
cgcgctcgaggacctccgcc

SEQ ID NO: 8094 - DNA, 20 bp, Artificial Sequence
  Description of Artificial Sequence: Synthetic oligonucleotide
  Target: APOC3; (-) strand; PAM type: NRG; PAM sequence: AGG
gaaggccaagcccgcgctcg

SEQ ID NO: 8095 - DNA, 20 bp, Artificial Sequence
  Description of Artificial Sequence: Synthetic oligonucleotide
  Target: APOC3; (-) strand; PAM type: NRG; PAM sequence: GAG
agaaggccaagcccgcgctc

SEQ ID NO: 8096 - DNA, 20 bp, Artificial Sequence
  Description of Artificial Sequence: Synthetic oligonucleotide
  Target: APOC3; (-) strand; PAM type: NRG; PAM sequence: AAG
gcacgctcagcgagaaggcc

SEQ ID NO: 8097 - DNA, 20 bp, Artificial Sequence
  Description of Artificial Sequence: Synthetic oligonucleotide
  Target: APOC3; (-) strand; PAM type: NRG; PAM sequence: AGG
tctgagcacgctcagcgaga

SEQ ID NO: 8098 - DNA, 20 bp, Artificial Sequence
  Description of Artificial Sequence: Synthetic oligonucleotide
  Target: APOC3; (-) strand; PAM type: NRG; PAM sequence: AAG
atctgagcacgctcagcgag

SEQ ID NO: 8099 - DNA, 20 bp, Artificial Sequence
  Description of Artificial Sequence: Synthetic oligonucleotide
  Target: APOC3; (-) strand; PAM type: NRG; PAM sequence: GAG
agcatctgagcacgctcagc

SEQ ID NO: 8100 - DNA, 20 bp, Artificial Sequence
  Description of Artificial Sequence: Synthetic oligonucleotide
  Target: APOC3; (-) strand; PAM type: NRG; PAM sequence: CAG
accgagcatctgagcacgct

SEQ ID NO: 8101 - DNA, 20 bp, Artificial Sequence
  Description of Artificial Sequence: Synthetic oligonucleotide
  Target: APOC3; (-) strand; PAM type: NRG; PAM sequence: GAG
gccaaggccaccgagcatct

SEQ ID NO: 8102 - DNA, 20 bp, Artificial Sequence
  Description of Artificial Sequence: Synthetic oligonucleotide
  Target: APOC3; (-) strand; PAM type: NRG; PAM sequence: GAG
agtaccacgccaaggccacc

SEQ ID NO: 8103 - DNA, 20 bp, Artificial Sequence
  Description of Artificial Sequence: Synthetic oligonucleotide
  Target: APOC3; (-) strand; PAM type: NRG; PAM sequence: AGG
actggccgagtaccacgcca

SEQ ID NO: 8104 - DNA, 20 bp, Artificial Sequence
  Description of Artificial Sequence: Synthetic oligonucleotide
  Target: APOC3; (-) strand; PAM type: NRG; PAM sequence: AAG
gactggccgagtaccacgcc

SEQ ID NO: 8105 - DNA, 20 bp, Artificial Sequence
  Description of Artificial Sequence: Synthetic oligonucleotide
  Target: APOC3; (-) strand; PAM type: NRG; PAM sequence: GAG
acggcggcgccagactggcc

SEQ ID NO: 8106 - DNA, 20 bp, Artificial Sequence
  Description of Artificial Sequence: Synthetic oligonucleotide
  Target: APOC3; (-) strand; PAM type: NRG; PAM sequence: TGG
ggagaacggcggcgccagac

SEQ ID NO: 8107 - DNA, 20 bp, Artificial Sequence
  Description of Artificial Sequence: Synthetic oligonucleotide
  Target: APOC3; (-) strand; PAM type: NRG; PAM sequence: CAG
ctcaaggagaacggcggcgc

SEQ ID NO: 8108 - DNA, 20 bp, Artificial Sequence
  Description of Artificial Sequence: Synthetic oligonucleotide
  Target: APOC3; (-) strand; PAM type: NRG; PAM sequence: CGG
gaggctctcaaggagaacgg

SEQ ID NO: 8109 - DNA, 20 bp, Artificial Sequence
  Description of Artificial Sequence: Synthetic oligonucleotide
  Target: APOC3; (-) strand; PAM type: NRG; PAM sequence: CGG
cttgaggctctcaaggagaa

SEQ ID NO: 8110 - DNA, 20 bp, Artificial Sequence
  Description of Artificial Sequence: Synthetic oligonucleotide
  Target: APOC3; (-) strand; PAM type: NRG; PAM sequence: GAG
cgcgccttgaggctctcaag

SEQ ID NO: 8111 - DNA, 20 bp, Artificial Sequence
  Description of Artificial Sequence: Synthetic oligonucleotide
  Target: APOC3; (-) strand; PAM type: NRG; PAM sequence: AGG
cgcgcgccttgaggctctca

SEQ ID NO: 8112 - DNA, 20 bp, Artificial Sequence
  Description of Artificial Sequence: Synthetic oligonucleotide
  Target: APOC3; (-) strand; PAM type: NRG; PAM sequence: AAG
ccgcgcgccttgaggctctc

SEQ ID NO: 8113 - DNA, 20 bp, Artificial Sequence
  Description of Artificial Sequence: Synthetic oligonucleotide
  Target: APOC3; (-) strand; PAM type: NRG; PAM sequence: AGG
gcgcttggccgcgcgccttg

SEQ ID NO: 8114 - DNA, 20 bp, Artificial Sequence
  Description of Artificial Sequence: Synthetic oligonucleotide
  Target: APOC3; (-) strand; PAM type: NRG; PAM sequence: GAG
agcgcttggccgcgcgcctt

SEQ ID NO: 8115 - DNA, 20 bp, Artificial Sequence
  Description of Artificial Sequence: Synthetic oligonucleotide
  Target: APOC3; (-) strand; PAM type: NRG; PAM sequence: TGG
cgacgagctgcgccagcgct

SEQ ID NO: 8116 - DNA, 20 bp, Artificial Sequence
  Description of Artificial Sequence: Synthetic oligonucleotide
  Target: APOC3; (-) strand; PAM type: NRG; PAM sequence: CAG
cctacagcgacgagctgcgc

SEQ ID NO: 8117 - DNA, 20 bp, Artificial Sequence
  Description of Artificial Sequence: Synthetic oligonucleotide
  Target: APOC3; (-) strand; PAM type: NRG; PAM sequence: GAG
atctggccccctacagcgac

SEQ ID NO: 8118 - DNA, 20 bp, Artificial Sequence
  Description of Artificial Sequence: Synthetic oligonucleotide
  Target: APOC3; (-) strand; PAM type: NRG; PAM sequence: CAG
cgcacgcatctggcccccta

SEQ ID NO: 8119 - DNA, 20 bp, Artificial Sequence
  Description of Artificial Sequence: Synthetic oligonucleotide
  Target: APOC3; (-) strand; PAM type: NRG; PAM sequence: TGG
ggacgcgctgcgcacgcatc

SEQ ID NO: 8120 - DNA, 20 bp, Artificial Sequence
  Description of Artificial Sequence: Synthetic oligonucleotide
  Target: APOC3; (-) strand; PAM type: NRG; PAM sequence: TGG
cgaccgcgcgcgcgcccatg

SEQ ID NO: 8121 - DNA, 20 bp, Artificial Sequence
  Description of Artificial Sequence: Synthetic oligonucleotide
  Target: APOC3; (-) strand; PAM type: NRG; PAM sequence: GAG
agctgagcccactgggcgag

SEQ ID NO: 8122 - DNA, 20 bp, Artificial Sequence
  Description of Artificial Sequence: Synthetic oligonucleotide
  Target: APOC3; (-) strand; PAM type: NRG; PAM sequence: AGG
gaagctgagcccactgggcg

SEQ ID NO: 8123 - DNA, 20 bp, Artificial Sequence
  Description of Artificial Sequence: Synthetic oligonucleotide
  Target: APOC3; (-) strand; PAM type: NRG; PAM sequence: GAG
agaagctgagcccactgggc

SEQ ID NO: 8124 - DNA, 20 bp, Artificial Sequence
  Description of Artificial Sequence: Synthetic oligonucleotide
  Target: APOC3; (-) strand; PAM type: NRG; PAM sequence: GGG
caagagaagctgagcccact

SEQ ID NO: 8125 - DNA, 20 bp, Artificial Sequence
  Description of Artificial Sequence: Synthetic oligonucleotide
  Target: APOC3; (-) strand; PAM type: NRG; PAM sequence: TGG
gcaagagaagctgagcccac

SEQ ID NO: 8126 - DNA, 20 bp, Artificial Sequence
  Description of Artificial Sequence: Synthetic oligonucleotide
  Target: APOC3; (-) strand; PAM type: NRG; PAM sequence: GAG
cacgagctgcaagagaagct

SEQ ID NO: 8127 - DNA, 20 bp, Artificial Sequence
  Description of Artificial Sequence: Synthetic oligonucleotide
  Target: APOC3; (-) strand; PAM type: NRG; PAM sequence: AAG
agctgcacgagctgcaagag

SEQ ID NO: 8128 - DNA, 20 bp, Artificial Sequence
  Description of Artificial Sequence: Synthetic oligonucleotide
  Target: APOC3; (-) strand; PAM type: NRG; PAM sequence: GAG
agaagctgcacgagctgcaa

SEQ ID NO: 8129 - DNA, 20 bp, Artificial Sequence
  Description of Artificial Sequence: Synthetic oligonucleotide
  Target: APOC3; (-) strand; PAM type: NRG; PAM sequence: AAG
ccagaagctgcacgagctgc

SEQ ID NO: 8130 - DNA, 20 bp, Artificial Sequence
  Description of Artificial Sequence: Synthetic oligonucleotide
  Target: APOC3; (-) strand; PAM type: NRG; PAM sequence: GAG
gcgcgcgccagaagctgcac

SEQ ID NO: 8131 - DNA, 20 bp, Artificial Sequence
  Description of Artificial Sequence: Synthetic oligonucleotide
  Target: APOC3; (-) strand; PAM type: NRG; PAM sequence: AAG
tccaagagggcgcgcgccag

SEQ ID NO: 8132 - DNA, 20 bp, Artificial Sequence
  Description of Artificial Sequence: Synthetic oligonucleotide
  Target: APOC3; (-) strand; PAM type: NRG; PAM sequence: CAG
agctccaagagggcgcgcgc

SEQ ID NO: 8133 - DNA, 20 bp, Artificial Sequence
  Description of Artificial Sequence: Synthetic oligonucleotide
  Target: APOC3; (-) strand; PAM type: NRG; PAM sequence: GGG
ctgcgcgcagagctccaaga

SEQ ID NO: 8134 - DNA, 20 bp, Artificial Sequence
  Description of Artificial Sequence: Synthetic oligonucleotide
  Target: APOC3; (-) strand; PAM type: NRG; PAM sequence: AGG
gctgcgcgcagagctccaag

SEQ ID NO: 8135 - DNA, 20 bp, Artificial Sequence
  Description of Artificial Sequence: Synthetic oligonucleotide
  Target: APOC3; (-) strand; PAM type: NRG; PAM sequence: GAG
cgctgcgcgcagagctccaa

SEQ ID NO: 8136 - DNA, 20 bp, Artificial Sequence
  Description of Artificial Sequence: Synthetic oligonucleotide
  Target: APOC3; (-) strand; PAM type: NRG; PAM sequence: AAG
gccgctgcgcgcagagctcc

SEQ ID NO: 8137 - DNA, 20 bp, Artificial Sequence
  Description of Artificial Sequence: Synthetic oligonucleotide
  Target: APOC3; (-) strand; PAM type: NRG; PAM sequence: GAG
aggtggagccgctgcgcgca

SEQ ID NO: 8138 - DNA, 20 bp, Artificial Sequence
  Description of Artificial Sequence: Synthetic oligonucleotide
  Target: APOC3; (-) strand; PAM type: NRG; PAM sequence: CAG
gaaggtggagccgctgcgcg

SEQ ID NO: 8139 - DNA, 20 bp, Artificial Sequence
  Description of Artificial Sequence: Synthetic oligonucleotide
  Target: APOC3; (-) strand; PAM type: NRG; PAM sequence: GAG
agctctaccgccagaaggtg

SEQ ID NO: 8140 - DNA, 20 bp, Artificial Sequence
  Description of Artificial Sequence: Synthetic oligonucleotide
  Target: APOC3; (-) strand; PAM type: NRG; PAM sequence: TGG
ggagctctaccgccagaagg

SEQ ID NO: 8141 - DNA, 20 bp, Artificial Sequence
  Description of Artificial Sequence: Synthetic oligonucleotide
  Target: APOC3; (-) strand; PAM type: NRG; PAM sequence: AGG
gatggagctctaccgccaga

SEQ ID NO: 8142 - DNA, 20 bp, Artificial Sequence
  Description of Artificial Sequence: Synthetic oligonucleotide
  Target: APOC3; (-) strand; PAM type: NRG; PAM sequence: AAG
agatggagctctaccgccag

SEQ ID NO: 8143 - DNA, 20 bp, Artificial Sequence
  Description of Artificial Sequence: Synthetic oligonucleotide
  Target: APOC3; (-) strand; PAM type: NRG; PAM sequence: CAG
aggagatggagctctaccgc

SEQ ID NO: 8144 - DNA, 20 bp, Artificial Sequence
  Description of Artificial Sequence: Synthetic oligonucleotide
  Target: APOC3; (-) strand; PAM type: NRG; PAM sequence: GAG
agaagtggcaggaggagatg

SEQ ID NO: 8145 - DNA, 20 bp, Artificial Sequence
  Description of Artificial Sequence: Synthetic oligonucleotide
  Target: APOC3; (-) strand; PAM type: NRG; PAM sequence: TGG
gaagaagtggcaggaggaga

SEQ ID NO: 8146 - DNA, 20 bp, Artificial Sequence
  Description of Artificial Sequence: Synthetic oligonucleotide
  Target: APOC3; (-) strand; PAM type: NRG; PAM sequence: GAG
tccagaagaagtggcaggag

SEQ ID NO: 8147 - DNA, 20 bp, Artificial Sequence
  Description of Artificial Sequence: Synthetic oligonucleotide
  Target: APOC3; (-) strand; PAM type: NRG; PAM sequence: AGG
cttccagaagaagtggcagg

SEQ ID NO: 8148 - DNA, 20 bp, Artificial Sequence
  Description of Artificial Sequence: Synthetic oligonucleotide
  Target: APOC3; (-) strand; PAM type: NRG; PAM sequence: GAG
acttccagaagaagtggcag

SEQ ID NO: 8149 - DNA, 20 bp, Artificial Sequence
  Description of Artificial Sequence: Synthetic oligonucleotide
  Target: APOC3; (-) strand; PAM type: NRG; PAM sequence: AGG
cgacttccagaagaagtggc

SEQ ID NO: 8150 - DNA, 20 bp, Artificial Sequence
  Description of Artificial Sequence: Synthetic oligonucleotide
  Target: APOC3; (-) strand; PAM type: NRG; PAM sequence: CAG
acgacttccagaagaagtgg

SEQ ID NO: 8151 - DNA, 20 bp, Artificial Sequence
  Description of Artificial Sequence: Synthetic oligonucleotide
  Target: APOC3; (-) strand; PAM type: NRG; PAM sequence: TGG
tggacgacttccagaagaag

SEQ ID NO: 8152 - DNA, 20 bp, Artificial Sequence
  Description of Artificial Sequence: Synthetic oligonucleotide
  Target: APOC3; (-) strand; PAM type: NRG; PAM sequence: AAG
acctggacgacttccagaag

SEQ ID NO: 8153 - DNA, 20 bp, Artificial Sequence
  Description of Artificial Sequence: Synthetic oligonucleotide
  Target: APOC3; (-) strand; PAM type: NRG; PAM sequence: AAG
cctacctggacgacttccag

SEQ ID NO: 8154 - DNA, 20 bp, Artificial Sequence
  Description of Artificial Sequence: Synthetic oligonucleotide
  Target: APOC3; (-) strand; PAM type: NRG; PAM sequence: CAG
agccctacctggacgacttc

SEQ ID NO: 8155 - DNA, 20 bp, Artificial Sequence
  Description of Artificial Sequence: Synthetic oligonucleotide
  Target: APOC3; (-) strand; PAM type: NRG; PAM sequence: TGG
ggccaaggtgcagccctacc

SEQ ID NO: 8156 - DNA, 20 bp, Artificial Sequence
  Description of Artificial Sequence: Synthetic oligonucleotide
  Target: APOC3; (-) strand; PAM type: NRG; PAM sequence: CAG
aggaggtgaaggccaaggtg

SEQ ID NO: 8157 - DNA, 20 bp, Artificial Sequence
  Description of Artificial Sequence: Synthetic oligonucleotide
  Target: APOC3; (-) strand; PAM type: NRG; PAM sequence: AGG
tctggaggaggtgaaggcca

SEQ ID NO: 8158 - DNA, 20 bp, Artificial Sequence
  Description of Artificial Sequence: Synthetic oligonucleotide
  Target: APOC3; (-) strand; PAM type: NRG; PAM sequence: AAG
atctggaggaggtgaaggcc

SEQ ID NO: 8159 - DNA, 20 bp, Artificial Sequence
  Description of Artificial Sequence: Synthetic oligonucleotide
  Target: APOC3; (-) strand; PAM type: NRG; PAM sequence: AGG
caaggatctggaggaggtga

SEQ ID NO: 8160 - DNA, 20 bp, Artificial Sequence
  Description of Artificial Sequence: Synthetic oligonucleotide
  Target: APOC3; (-) strand; PAM type: NRG; PAM sequence: AAG
gcaaggatctggaggaggtg

SEQ ID NO: 8161 - DNA, 20 bp, Artificial Sequence
  Description of Artificial Sequence: Synthetic oligonucleotide
  Target: APOC3; (-) strand; PAM type: NRG; PAM sequence: AGG
gatgagcaaggatctggagg

SEQ ID NO: 8162 - DNA, 20 bp, Artificial Sequence
  Description of Artificial Sequence: Synthetic oligonucleotide
  Target: APOC3; (-) strand; PAM type: NRG; PAM sequence: GAG
agatgagcaaggatctggag

SEQ ID NO: 8163 - DNA, 20 bp, Artificial Sequence
  Description of Artificial Sequence: Synthetic oligonucleotide
  Target: APOC3; (-) strand; PAM type: NRG; PAM sequence: AGG
ggagatgagcaaggatctgg

SEQ ID NO: 8164 - DNA, 20 bp, Artificial Sequence
  Description of Artificial Sequence: Synthetic oligonucleotide
  Target: APOC3; (-) strand; PAM type: NRG; PAM sequence: GAG
aggagatgagcaaggatctg

SEQ ID NO: 8165 - DNA, 20 bp, Artificial Sequence
  Description of Artificial Sequence: Synthetic oligonucleotide
  Target: APOC3; (-) strand; PAM type: NRG; PAM sequence: TGG
gcaggagatgagcaaggatc

SEQ ID NO: 8166 - DNA, 20 bp, Artificial Sequence
  Description of Artificial Sequence: Synthetic oligonucleotide
  Target: APOC3; (-) strand; PAM type: NRG; PAM sequence: AGG
cctgaggcaggagatgagca

SEQ ID NO: 8167 - DNA, 20 bp, Artificial Sequence
  Description of Artificial Sequence: Synthetic oligonucleotide
  Target: APOC3; (-) strand; PAM type: NRG; PAM sequence: AAG
gcctgaggcaggagatgagc

SEQ ID NO: 8168 - DNA, 20 bp, Artificial Sequence
  Description of Artificial Sequence: Synthetic oligonucleotide
  Target: APOC3; (-) strand; PAM type: NRG; PAM sequence: GAG
gagggcctgaggcaggagat

SEQ ID NO: 8169 - DNA, 20 bp, Artificial Sequence
  Description of Artificial Sequence: Synthetic oligonucleotide
  Target: APOC3; (-) strand; PAM type: NRG; PAM sequence: GAG
agacagagggcctgaggcag

SEQ ID NO: 8170 - DNA, 20 bp, Artificial Sequence
  Description of Artificial Sequence: Synthetic oligonucleotide
  Target: APOC3; (-) strand; PAM type: NRG; PAM sequence: AGG
ggagacagagggcctgaggc

SEQ ID NO: 8171 - DNA, 20 bp, Artificial Sequence
  Description of Artificial Sequence: Synthetic oligonucleotide
  Target: APOC3; (-) strand; PAM type: NRG; PAM sequence: CAG
aggagacagagggcctgagg

SEQ ID NO: 8172 - DNA, 20 bp, Artificial Sequence
  Description of Artificial Sequence: Synthetic oligonucleotide
  Target: APOC3; (-) strand; PAM type: NRG; PAM sequence: AGG
aaaaggagacagagggcctg

SEQ ID NO: 8173 - DNA, 20 bp, Artificial Sequence
  Description of Artificial Sequence: Synthetic oligonucleotide
  Target: APOC3; (-) strand; PAM type: NRG; PAM sequence: GAG
gaaaaggagacagagggcct

SEQ ID NO: 8174 - DNA, 20 bp, Artificial Sequence
  Description of Artificial Sequence: Synthetic oligonucleotide
  Target: APOC3; (-) strand; PAM type: NRG; PAM sequence: GGG
aacctggaaaaggagacaga

SEQ ID NO: 8175 - DNA, 20 bp, Artificial Sequence
  Description of Artificial Sequence: Synthetic oligonucleotide
  Target: APOC3; (-) strand; PAM type: NRG; PAM sequence: AGG
taacctggaaaaggagacag

SEQ ID NO: 8176 - DNA, 20 bp, Artificial Sequence
  Description of Artificial Sequence: Synthetic oligonucleotide
  Target: APOC3; (-) strand; PAM type: NRG; PAM sequence: GAG
ataacctggaaaaggagaca

SEQ ID NO: 8177 - DNA, 20 bp, Artificial Sequence
  Description of Artificial Sequence: Synthetic oligonucleotide
  Target: APOC3; (-) strand; PAM type: NRG; PAM sequence: CAG
ggataacctggaaaaggaga

SEQ ID NO: 8178 - DNA, 20 bp, Artificial Sequence
  Description of Artificial Sequence: Synthetic oligonucleotide
  Target: APOC3; (-) strand; PAM type: NRG; PAM sequence: GAG
tctgggataacctggaaaag

SEQ ID NO: 8179 - DNA, 20 bp, Artificial Sequence
  Description of Artificial Sequence: Synthetic oligonucleotide
  Target: APOC3; (-) strand; PAM type: NRG; PAM sequence: AGG
gttctgggataacctggaaa

SEQ ID NO: 8180 - DNA, 20 bp, Artificial Sequence
  Description of Artificial Sequence: Synthetic oligonucleotide
  Target: APOC3; (-) strand; PAM type: NRG; PAM sequence: AAG
agttctgggataacctggaa

SEQ ID NO: 8181 - DNA, 20 bp, Artificial Sequence
  Description of Artificial Sequence: Synthetic oligonucleotide
  Target: APOC3; (-) strand; PAM type: NRG; PAM sequence: TGG
ccaggagttctgggataacc

SEQ ID NO: 8182 - DNA, 20 bp, Artificial Sequence
  Description of Artificial Sequence: Synthetic oligonucleotide
  Target: APOC3; (-) strand; PAM type: NRG; PAM sequence: GGG
ccctgtgacccaggagttct

SEQ ID NO: 8183 - DNA, 20 bp, Artificial Sequence
  Description of Artificial Sequence: Synthetic oligonucleotide
  Target: APOC3; (-) strand; PAM type: NRG; PAM sequence: TGG
gccctgtgacccaggagttc

SEQ ID NO: 8184 - DNA, 20 bp, Artificial Sequence
  Description of Artificial Sequence: Synthetic oligonucleotide
  Target: APOC3; (-) strand; PAM type: NRG; PAM sequence: GAG
agctcggccctgtgacccag

SEQ ID NO: 8185 - DNA, 20 bp, Artificial Sequence
  Description of Artificial Sequence: Synthetic oligonucleotide
  Target: APOC3; (-) strand; PAM type: NRG; PAM sequence: AGG
acagctcggccctgtgaccc

SEQ ID NO: 8186 - DNA, 20 bp, Artificial Sequence
  Description of Artificial Sequence: Synthetic oligonucleotide
  Target: APOC3; (-) strand; PAM type: NRG; PAM sequence: CAG
aacagctcggccctgtgacc

SEQ ID NO: 8187 - DNA, 20 bp, Artificial Sequence
  Description of Artificial Sequence: Synthetic oligonucleotide
  Target: APOC3; (-) strand; PAM type: NRG; PAM sequence: CGG
agcaagctgcgcgaacagct

SEQ ID NO: 8188 - DNA, 20 bp, Artificial Sequence
  Description of Artificial Sequence: Synthetic oligonucleotide
  Target: APOC3; (-) strand; PAM type: NRG; PAM sequence: CAG
ccttcagcaagctgcgcgaa

SEQ ID NO: 8189 - DNA, 20 bp, Artificial Sequence
  Description of Artificial Sequence: Synthetic oligonucleotide
  Target: APOC3; (-) strand; PAM type: NRG; PAM sequence: AAG
gcgtgacctccaccttcagc

SEQ ID NO: 8190 - DNA, 20 bp, Artificial Sequence
  Description of Artificial Sequence: Synthetic oligonucleotide
  Target: APOC3; (-) strand; PAM type: NRG; PAM sequence: CAG
gacagcgtgacctccacctt

SEQ ID NO: 8191 - DNA, 20 bp, Artificial Sequence
  Description of Artificial Sequence: Synthetic oligonucleotide
  Target: APOC3; (-) strand; PAM type: NRG; PAM sequence: CAG
aagctccttgacaactggga

SEQ ID NO: 8192 - DNA, 20 bp, Artificial Sequence
  Description of Artificial Sequence: Synthetic oligonucleotide
  Target: APOC3; (-) strand; PAM type: NRG; PAM sequence: GGG
cctaaagctccttgacaact

SEQ ID NO: 8193 - DNA, 20 bp, Artificial Sequence
  Description of Artificial Sequence: Synthetic oligonucleotide
  Target: APOC3; (-) strand; PAM type: NRG; PAM sequence: TGG
gcctaaagctccttgacaac

SEQ ID NO: 8194 - DNA, 20 bp, Artificial Sequence
  Description of Artificial Sequence: Synthetic oligonucleotide
  Target: APOC3; (-) strand; PAM type: NRG; PAM sequence: AAG
ctgtctcaccctccagccta

SEQ ID NO: 8195 - DNA, 20 bp, Artificial Sequence
  Description of Artificial Sequence: Synthetic oligonucleotide
  Target: APOC3; (-) strand; PAM type: NRG; PAM sequence: CAG
aacccttctgtctcaccctc

SEQ ID NO: 8196 - DNA, 20 bp, Artificial Sequence
  Description of Artificial Sequence: Synthetic oligonucleotide
  Target: APOC3; (-) strand; PAM type: NRG; PAM sequence: CAG
aggctggggcgctgggaggc

SEQ ID NO: 8197 - DNA, 20 bp, Artificial Sequence
  Description of Artificial Sequence: Synthetic oligonucleotide
  Target: APOC3; (-) strand; PAM type: NRG; PAM sequence: AGG
tgataggctggggcgctggg

SEQ ID NO: 8198 - DNA, 20 bp, Artificial Sequence
  Description of Artificial Sequence: Synthetic oligonucleotide
  Target: APOC3; (-) strand; PAM type: NRG; PAM sequence: GAG
ctgataggctggggcgctgg

SEQ ID NO: 8199 - DNA, 20 bp, Artificial Sequence
  Description of Artificial Sequence: Synthetic oligonucleotide
  Target: APOC3; (-) strand; PAM type: NRG; PAM sequence: GGG
ccctgataggctggggcgct

SEQ ID NO: 8200 - DNA, 20 bp, Artificial Sequence
  Description of Artificial Sequence: Synthetic oligonucleotide
  Target: APOC3; (-) strand; PAM type: NRG; PAM sequence: TGG
cccctgataggctggggcgc

SEQ ID NO: 8201 - DNA, 20 bp, Artificial Sequence
  Description of Artificial Sequence: Synthetic oligonucleotide
  Target: APOC3; (-) strand; PAM type: NRG; PAM sequence: GGG
ggctcacccctgataggctg

SEQ ID NO: 8202 - DNA, 20 bp, Artificial Sequence
  Description of Artificial Sequence: Synthetic oligonucleotide
  Target: APOC3; (-) strand; PAM type: NRG; PAM sequence: GGG
gggctcacccctgataggct

SEQ ID NO: 8203 - DNA, 20 bp, Artificial Sequence
  Description of Artificial Sequence: Synthetic oligonucleotide
  Target: APOC3; (-) strand; PAM type: NRG; PAM sequence: TGG
agggctcacccctgataggc

SEQ ID NO: 8204 - DNA, 20 bp, Artificial Sequence
  Description of Artificial Sequence: Synthetic oligonucleotide
  Target: APOC3; (-) strand; PAM type: NRG; PAM sequence: AGG
acccagggctcacccctgat

SEQ ID NO: 8205 - DNA, 20 bp, Artificial Sequence
  Description of Artificial Sequence: Synthetic oligonucleotide
  Target: APOC3; (-) strand; PAM type: NRG; PAM sequence: TAG
cacccagggctcacccctga

SEQ ID NO: 8206 - DNA, 20 bp, Artificial Sequence
  Description of Artificial Sequence: Synthetic oligonucleotide
  Target: APOC3; (-) strand; PAM type: NRG; PAM sequence: GGG
ccgcggacaggtgtcaccca

SEQ ID NO: 8207 - DNA, 20 bp, Artificial Sequence
  Description of Artificial Sequence: Synthetic oligonucleotide
  Target: APOC3; (-) strand; PAM type: NRG; PAM sequence: AGG
tccgcggacaggtgtcaccc

SEQ ID NO: 8208 - DNA, 20 bp, Artificial Sequence
  Description of Artificial Sequence: Synthetic oligonucleotide
  Target: APOC3; (-) strand; PAM type: NRG; PAM sequence: CAG
ctccgcggacaggtgtcacc

SEQ ID NO: 8209 - DNA, 20 bp, Artificial Sequence
  Description of Artificial Sequence: Synthetic oligonucleotide
  Target: APOC3; (-) strand; PAM type: NRG; PAM sequence: AGG
gccactgcacctccgcggac

SEQ ID NO: 8210 - DNA, 20 bp, Artificial Sequence
  Description of Artificial Sequence: Synthetic oligonucleotide
  Target: APOC3; (-) strand; PAM type: NRG; PAM sequence: CAG
ggccactgcacctccgcgga

SEQ ID NO: 8211 - DNA, 20 bp, Artificial Sequence
  Description of Artificial Sequence: Synthetic oligonucleotide
  Target: APOC3; (-) strand; PAM type: NRG; PAM sequence: CGG
gctaggccactgcacctccg

SEQ ID NO: 8212 - DNA, 20 bp, Artificial Sequence
  Description of Artificial Sequence: Synthetic oligonucleotide
  Target: APOC3; (-) strand; PAM type: NRG; PAM sequence: AGG
gagagtgtactggaaatgct

SEQ ID NO: 8213 - DNA, 20 bp, Artificial Sequence
  Description of Artificial Sequence: Synthetic oligonucleotide
  Target: APOC3; (-) strand; PAM type: NRG; PAM sequence: TAG
tgagagtgtactggaaatgc

SEQ ID NO: 8214 - DNA, 20 bp, Artificial Sequence
  Description of Artificial Sequence: Synthetic oligonucleotide
  Target: APOC3; (-) strand; PAM type: NRG; PAM sequence: TGG
ggtgttggttgagagtgtac

SEQ ID NO: 8215 - DNA, 20 bp, Artificial Sequence
  Description of Artificial Sequence: Synthetic oligonucleotide
  Target: APOC3; (-) strand; PAM type: NRG; PAM sequence: GAG
ggggcaggggtgttggttga

SEQ ID NO: 8216 - DNA, 20 bp, Artificial Sequence
  Description of Artificial Sequence: Synthetic oligonucleotide
  Target: APOC3; (-) strand; PAM type: NRG; PAM sequence: GAG
gcggggcaggggtgttggtt

SEQ ID NO: 8217 - DNA, 20 bp, Artificial Sequence
  Description of Artificial Sequence: Synthetic oligonucleotide
  Target: APOC3; (-) strand; PAM type: NRG; PAM sequence: TGG
gcctggcggggcaggggtgt

SEQ ID NO: 8218 - DNA, 20 bp, Artificial Sequence
  Description of Artificial Sequence: Synthetic oligonucleotide
  Target: APOC3; (-) strand; PAM type: NRG; PAM sequence: GGG
ggcatggcctggcggggcag

SEQ ID NO: 8219 - DNA, 20 bp, Artificial Sequence
  Description of Artificial Sequence: Synthetic oligonucleotide
  Target: APOC3; (-) strand; PAM type: NRG; PAM sequence: GGG
gggcatggcctggcggggca

SEQ ID NO: 8220 - DNA, 20 bp, Artificial Sequence
  Description of Artificial Sequence: Synthetic oligonucleotide
  Target: APOC3; (-) strand; PAM type: NRG; PAM sequence: AGG
ggggcatggcctggcggggc

SEQ ID NO: 8221 - DNA, 20 bp, Artificial Sequence
  Description of Artificial Sequence: Synthetic oligonucleotide
  Target: APOC3; (-) strand; PAM type: NRG; PAM sequence: CAG
cggggcatggcctggcgggg

SEQ ID NO: 8222 - DNA, 20 bp, Artificial Sequence
  Description of Artificial Sequence: Synthetic oligonucleotide
  Target: APOC3; (-) strand; PAM type: NRG; PAM sequence: GGG
caacggggcatggcctggcg

SEQ ID NO: 8223 - DNA, 20 bp, Artificial Sequence
  Description of Artificial Sequence: Synthetic oligonucleotide
  Target: APOC3; (-) strand; PAM type: NRG; PAM sequence: GGG
acaacggggcatggcctggc

SEQ ID NO: 8224 - DNA, 20 bp, Artificial Sequence
  Description of Artificial Sequence: Synthetic oligonucleotide
  Target: APOC3; (-) strand; PAM type: NRG; PAM sequence: CGG
cacaacggggcatggcctgg

SEQ ID NO: 8225 - DNA, 20 bp, Artificial Sequence
  Description of Artificial Sequence: Synthetic oligonucleotide
  Target: APOC3; (-) strand; PAM type: NRG; PAM sequence: TGG
ctgcacaacggggcatggcc

SEQ ID NO: 8226 - DNA, 20 bp, Artificial Sequence
  Description of Artificial Sequence: Synthetic oligonucleotide
  Target: APOC3; (-) strand; PAM type: NRG; PAM sequence: TGG
tccagctgcacaacggggca

SEQ ID NO: 8227 - DNA, 20 bp, Artificial Sequence
  Description of Artificial Sequence: Synthetic oligonucleotide
  Target: APOC3; (-) strand; PAM type: NRG; PAM sequence: GGG
ctcggtccagctgcacaacg

SEQ ID NO: 8228 - DNA, 20 bp, Artificial Sequence
  Description of Artificial Sequence: Synthetic oligonucleotide
  Target: APOC3; (-) strand; PAM type: NRG; PAM sequence: GGG
cctcggtccagctgcacaac

SEQ ID NO: 8229 - DNA, 20 bp, Artificial Sequence
  Description of Artificial Sequence: Synthetic oligonucleotide
  Target: APOC3; (-) strand; PAM type: NRG; PAM sequence: CGG
gcctcggtccagctgcacaa

SEQ ID NO: 8230 - DNA, 20 bp, Artificial Sequence
  Description of Artificial Sequence: Synthetic oligonucleotide
  Target: APOC3; (-) strand; PAM type: NRG; PAM sequence: CAG
ctcctctctgtgcctcggtc

SEQ ID NO: 8231 - DNA, 20 bp, Artificial Sequence
  Description of Artificial Sequence: Synthetic oligonucleotide
  Target: APOC3; (-) strand; PAM type: NRG; PAM sequence: CGG
tttagctcctctctgtgcct

SEQ ID NO: 8232 - DNA, 20 bp, Artificial Sequence
  Description of Artificial Sequence: Synthetic oligonucleotide
  Target: APOC3; (-) strand; PAM type: NRG; PAM sequence: TAG
tcccagctctgtctcctttt

SEQ ID NO: 8233 - DNA, 20 bp, Artificial Sequence
  Description of Artificial Sequence: Synthetic oligonucleotide
  Target: APOC3; (-) strand; PAM type: NRG; PAM sequence: CAG
acgtaactgggcactagtcc

SEQ ID NO: 8234 - DNA, 20 bp, Artificial Sequence
  Description of Artificial Sequence: Synthetic oligonucleotide
  Target: APOC3; (-) strand; PAM type: NRG; PAM sequence: TAG
agaccaacgtaactgggcac

SEQ ID NO: 8235 - DNA, 20 bp, Artificial Sequence
  Description of Artificial Sequence: Synthetic oligonucleotide
  Target: APOC3; (-) strand; PAM type: NRG; PAM sequence: GGG
ctttggagaccaacgtaact

SEQ ID NO: 8236 - DNA, 20 bp, Artificial Sequence
  Description of Artificial Sequence: Synthetic oligonucleotide
  Target: APOC3; (-) strand; PAM type: NRG; PAM sequence: TGG
actttggagaccaacgtaac

SEQ ID NO: 8237 - DNA, 20 bp, Artificial Sequence
  Description of Artificial Sequence: Synthetic oligonucleotide
  Target: APOC3; (-) strand; PAM type: NRG; PAM sequence: GAG
tccttcaagggcccactttg

SEQ ID NO: 8238 - DNA, 20 bp, Artificial Sequence
  Description of Artificial Sequence: Synthetic oligonucleotide
  Target: APOC3; (-) strand; PAM type: NRG; PAM sequence: TGG
ggtccttcaagggcccactt

SEQ ID NO: 8239 - DNA, 20 bp, Artificial Sequence
  Description of Artificial Sequence: Synthetic oligonucleotide
  Target: APOC3; (-) strand; PAM type: NRG; PAM sequence: GGG
atagaagcgaggtccttcaa

SEQ ID NO: 8240 - DNA, 20 bp, Artificial Sequence
  Description of Artificial Sequence: Synthetic oligonucleotide
  Target: APOC3; (-) strand; PAM type: NRG; PAM sequence: AGG
catagaagcgaggtccttca

SEQ ID NO: 8241 - DNA, 20 bp, Artificial Sequence
  Description of Artificial Sequence: Synthetic oligonucleotide
  Target: APOC3; (-) strand; PAM type: NRG; PAM sequence: AAG
gcatagaagcgaggtccttc

SEQ ID NO: 8242 - DNA, 20 bp, Artificial Sequence
  Description of Artificial Sequence: Synthetic oligonucleotide
  Target: APOC3; (-) strand; PAM type: NRG; PAM sequence: AGG
gcgctggaggcatagaagcg

SEQ ID NO: 8243 - DNA, 20 bp, Artificial Sequence
  Description of Artificial Sequence: Synthetic oligonucleotide
  Target: APOC3; (-) strand; PAM type: NRG; PAM sequence: GAG
tgcgctggaggcatagaagc

SEQ ID NO: 8244 - DNA, 20 bp, Artificial Sequence
  Description of Artificial Sequence: Synthetic oligonucleotide
  Target: APOC3; (-) strand; PAM type: NRG; PAM sequence: AAG
agaatgcgctggaggcatag

SEQ ID NO: 8245 - DNA, 20 bp, Artificial Sequence
  Description of Artificial Sequence: Synthetic oligonucleotide
  Target: APOC3; (-) strand; PAM type: NRG; PAM sequence: TAG
aggagaatgcgctggaggca

SEQ ID NO: 8246 - DNA, 20 bp, Artificial Sequence
  Description of Artificial Sequence: Synthetic oligonucleotide
  Target: APOC3; (-) strand; PAM type: NRG; PAM sequence: AGG
cggagaggagaatgcgctgg

SEQ ID NO: 8247 - DNA, 20 bp, Artificial Sequence
  Description of Artificial Sequence: Synthetic oligonucleotide
  Target: APOC3; (-) strand; PAM type: NRG; PAM sequence: GAG
tcggagaggagaatgcgctg

SEQ ID NO: 8248 - DNA, 20 bp, Artificial Sequence
  Description of Artificial Sequence: Synthetic oligonucleotide
  Target: APOC3; (-) strand; PAM type: NRG; PAM sequence: TGG
cttcggagaggagaatgcgc

SEQ ID NO: 8249 - DNA, 20 bp, Artificial Sequence
  Description of Artificial Sequence: Synthetic oligonucleotide
  Target: APOC3; (-) strand; PAM type: NRG; PAM sequence: GAG
tgtgggctgtcttcggagag

SEQ ID NO: 8250 - DNA, 20 bp, Artificial Sequence
  Description of Artificial Sequence: Synthetic oligonucleotide
  Target: APOC3; (-) strand; PAM type: NRG; PAM sequence: AGG
actgtgggctgtcttcggag

SEQ ID NO: 8251 - DNA, 20 bp, Artificial Sequence
  Description of Artificial Sequence: Synthetic oligonucleotide
  Target: APOC3; (-) strand; PAM type: NRG; PAM sequence: GAG
gactgtgggctgtcttcgga

SEQ ID NO: 8252 - DNA, 20 bp, Artificial Sequence
  Description of Artificial Sequence: Synthetic oligonucleotide
  Target: APOC3; (-) strand; PAM type: NRG; PAM sequence: GAG
aagactgtgggctgtcttcg

SEQ ID NO: 8253 - DNA, 20 bp, Artificial Sequence
  Description of Artificial Sequence: Synthetic oligonucleotide
  Target: APOC3; (-) strand; PAM type: NRG; PAM sequence: CGG
gcaagactgtgggctgtctt

SEQ ID NO: 8254 - DNA, 20 bp, Artificial Sequence
  Description of Artificial Sequence: Synthetic oligonucleotide
  Target: APOC3; (-) strand; PAM type: NRG; PAM sequence: GGG
ctcctgcccagcaagactgt

SEQ ID NO: 8255 - DNA, 20 bp, Artificial Sequence
  Description of Artificial Sequence: Synthetic oligonucleotide
  Target: APOC3; (-) strand; PAM type: NRG; PAM sequence: TGG
gctcctgcccagcaagactg

SEQ ID NO: 8256 - DNA, 20 bp, Artificial Sequence
  Description of Artificial Sequence: Synthetic oligonucleotide
  Target: APOC3; (-) strand; PAM type: NRG; PAM sequence: AAG
ctcctctgctcctgcccagc

SEQ ID NO: 8257 - DNA, 20 bp, Artificial Sequence
  Description of Artificial Sequence: Synthetic oligonucleotide
  Target: APOC3; (-) strand; PAM type: NRG; PAM sequence: CAG
ccacctcctctgctcctgcc

SEQ ID NO: 8258 - DNA, 20 bp, Artificial Sequence
  Description of Artificial Sequence: Synthetic oligonucleotide
  Target: APOC3; (-) strand; PAM type: NRG; PAM sequence: AAG
attgtgcctgcaagtgtagc

SEQ ID NO: 8259 - DNA, 20 bp, Artificial Sequence
  Description of Artificial Sequence: Synthetic oligonucleotide
  Target: APOC3; (-) strand; PAM type: NRG; PAM sequence: TAG
ccacattgtgcctgcaagtg

SEQ ID NO: 8260 - DNA, 20 bp, Artificial Sequence
  Description of Artificial Sequence: Synthetic oligonucleotide
  Target: APOC3; (-) strand; PAM type: NRG; PAM sequence: AAG
cagagccacattgtgcctgc

SEQ ID NO: 8261 - DNA, 20 bp, Artificial Sequence
  Description of Artificial Sequence: Synthetic oligonucleotide
  Target: APOC3; (-) strand; PAM type: NRG; PAM sequence: GAG
ctgcccgatgcgtgatcaca

SEQ ID NO: 8262 - DNA, 20 bp, Artificial Sequence
  Description of Artificial Sequence: Synthetic oligonucleotide
  Target: APOC3; (-) strand; PAM type: NRG; PAM sequence: CAG
ggctgcccgatgcgtgatca

SEQ ID NO: 8263 - DNA, 20 bp, Artificial Sequence
  Description of Artificial Sequence: Synthetic oligonucleotide
  Target: APOC3; (-) strand; PAM type: NRG; PAM sequence: GGG
cccctgcaaaggacagacca

SEQ ID NO: 8264 - DNA, 20 bp, Artificial Sequence
  Description of Artificial Sequence: Synthetic oligonucleotide
  Target: APOC3; (-) strand; PAM type: NRG; PAM sequence: AGG
tcccctgcaaaggacagacc

SEQ ID NO: 8265 - DNA, 20 bp, Artificial Sequence
  Description of Artificial Sequence: Synthetic oligonucleotide
  Target: APOC3; (-) strand; PAM type: NRG; PAM sequence: CAG
gtcccctgcaaaggacagac

SEQ ID NO: 8266 - DNA, 20 bp, Artificial Sequence
  Description of Artificial Sequence: Synthetic oligonucleotide
  Target: APOC3; (-) strand; PAM type: NRG; PAM sequence: CAG
cccatgtcccctgcaaagga

SEQ ID NO: 8267 - DNA, 20 bp, Artificial Sequence
  Description of Artificial Sequence: Synthetic oligonucleotide
  Target: APOC3; (-) strand; PAM type: NRG; PAM sequence: AGG
acagcccatgtcccctgcaa

SEQ ID NO: 8268 - DNA, 20 bp, Artificial Sequence
  Description of Artificial Sequence: Synthetic oligonucleotide
  Target: APOC3; (-) strand; PAM type: NRG; PAM sequence: AAG
cacagcccatgtcccctgca

SEQ ID NO: 8269 - DNA, 20 bp, Artificial Sequence
  Description of Artificial Sequence: Synthetic oligonucleotide
  Target: APOC3; (-) strand; PAM type: NRG; PAM sequence: CAG
gggatctccaggcagggtca

SEQ ID NO: 8270 - DNA, 20 bp, Artificial Sequence
  Description of Artificial Sequence: Synthetic oligonucleotide
  Target: APOC3; (-) strand; PAM type: NRG; PAM sequence: GGG
tggaatgggatctccaggca

SEQ ID NO: 8271 - DNA, 20 bp, Artificial Sequence
  Description of Artificial Sequence: Synthetic oligonucleotide
  Target: APOC3; (-) strand; PAM type: NRG; PAM sequence: AGG
ctggaatgggatctccaggc

SEQ ID NO: 8272 - DNA, 20 bp, Artificial Sequence
  Description of Artificial Sequence: Synthetic oligonucleotide
  Target: APOC3; (-) strand; PAM type: NRG; PAM sequence: CAG
actggaatgggatctccagg

SEQ ID NO: 8273 - DNA, 20 bp, Artificial Sequence
  Description of Artificial Sequence: Synthetic oligonucleotide
  Target: APOC3; (-) strand; PAM type: NRG; PAM sequence: AGG
gaaactggaatgggatctcc

SEQ ID NO: 8274 - DNA, 20 bp, Artificial Sequence
  Description of Artificial Sequence: Synthetic oligonucleotide
  Target: APOC3; (-) strand; PAM type: NRG; PAM sequence: CAG
agaaactggaatgggatctc

SEQ ID NO: 8275 - DNA, 20 bp, Artificial Sequence
  Description of Artificial Sequence: Synthetic oligonucleotide
  Target: APOC3; (-) strand; PAM type: NRG; PAM sequence: GGG
ctggatggagaaactggaat

SEQ ID NO: 8276 - DNA, 20 bp, Artificial Sequence
  Description of Artificial Sequence: Synthetic oligonucleotide
  Target: APOC3; (-) strand; PAM type: NRG; PAM sequence: TGG
tctggatggagaaactggaa

SEQ ID NO: 8277 - DNA, 20 bp, Artificial Sequence
  Description of Artificial Sequence: Synthetic oligonucleotide
  Target: APOC3; (-) strand; PAM type: NRG; PAM sequence: TGG
gatggtctggatggagaaac

SEQ ID NO: 8278 - DNA, 20 bp, Artificial Sequence
  Description of Artificial Sequence: Synthetic oligonucleotide
  Target: APOC3; (-) strand; PAM type: NRG; PAM sequence: GAG
ccccacagatggtctggatg

SEQ ID NO: 8279 - DNA, 20 bp, Artificial Sequence
  Description of Artificial Sequence: Synthetic oligonucleotide
  Target: APOC3; (-) strand; PAM type: NRG; PAM sequence: TGG
ggccccacagatggtctgga

SEQ ID NO: 8280 - DNA, 20 bp, Artificial Sequence
  Description of Artificial Sequence: Synthetic oligonucleotide
  Target: APOC3; (-) strand; PAM type: NRG; PAM sequence: TGG
gctgggccccacagatggtc

SEQ ID NO: 8281 - DNA, 20 bp, Artificial Sequence
  Description of Artificial Sequence: Synthetic oligonucleotide
  Target: APOC3; (-) strand; PAM type: NRG; PAM sequence: TGG
gatgagctgggccccacaga

SEQ ID NO: 8282 - DNA, 20 bp, Artificial Sequence
  Description of Artificial Sequence: Synthetic oligonucleotide
  Target: APOC3; (-) strand; PAM type: NRG; PAM sequence: CAG
atctgatgagctgggcccca

SEQ ID NO: 8283 - DNA, 20 bp, Artificial Sequence
  Description of Artificial Sequence: Synthetic oligonucleotide
  Target: APOC3; (-) strand; PAM type: NRG; PAM sequence: GGG
cacctaatatctgatgagct

SEQ ID NO: 8284 - DNA, 20 bp, Artificial Sequence
  Description of Artificial Sequence: Synthetic oligonucleotide
  Target: APOC3; (-) strand; PAM type: NRG; PAM sequence: TGG
tcacctaatatctgatgagc

SEQ ID NO: 8285 - DNA, 20 bp, Artificial Sequence
  Description of Artificial Sequence: Synthetic oligonucleotide
  Target: APOC3; (-) strand; PAM type: NRG; PAM sequence: GAG
gtcctcacctaatatctgat

SEQ ID NO: 8286 - DNA, 20 bp, Artificial Sequence
  Description of Artificial Sequence: Synthetic oligonucleotide
  Target: APOC3; (-) strand; PAM type: NRG; PAM sequence: GAG
atgttgaagccagactggcc

SEQ ID NO: 8287 - DNA, 20 bp, Artificial Sequence
  Description of Artificial Sequence: Synthetic oligonucleotide
  Target: APOC3; (-) strand; PAM type: NRG; PAM sequence: TGG
ggatgatgttgaagccagac

SEQ ID NO: 8288 - DNA, 20 bp, Artificial Sequence
  Description of Artificial Sequence: Synthetic oligonucleotide
  Target: APOC3; (-) strand; PAM type: NRG; PAM sequence: CAG
ctgtgggatgatgttgaagc

SEQ ID NO: 8289 - DNA, 20 bp, Artificial Sequence
  Description of Artificial Sequence: Synthetic oligonucleotide
  Target: APOC3; (-) strand; PAM type: NRG; PAM sequence: AAG
aggcctgtgggatgatgttg

SEQ ID NO: 8290 - DNA, 20 bp, Artificial Sequence
  Description of Artificial Sequence: Synthetic oligonucleotide
  Target: APOC3; (-) strand; PAM type: NRG; PAM sequence: GGG
ggtagggggcagaggcctgt

SEQ ID NO: 8291 - DNA, 20 bp, Artificial Sequence
  Description of Artificial Sequence: Synthetic oligonucleotide
  Target: APOC3; (-) strand; PAM type: NRG; PAM sequence: TGG
gggtagggggcagaggcctg

SEQ ID NO: 8292 - DNA, 20 bp, Artificial Sequence
  Description of Artificial Sequence: Synthetic oligonucleotide
  Target: APOC3; (-) strand; PAM type: NRG; PAM sequence: AGG
agggcaggggtagggggcag

SEQ ID NO: 8293 - DNA, 20 bp, Artificial Sequence
  Description of Artificial Sequence: Synthetic oligonucleotide
  Target: APOC3; (-) strand; PAM type: NRG; PAM sequence: GAG
gagggcaggggtagggggca

SEQ ID NO: 8294 - DNA, 20 bp, Artificial Sequence
  Description of Artificial Sequence: Synthetic oligonucleotide
  Target: APOC3; (-) strand; PAM type: NRG; PAM sequence: CAG
ttgagggcaggggtaggggg

SEQ ID NO: 8295 - DNA, 20 bp, Artificial Sequence
  Description of Artificial Sequence: Synthetic oligonucleotide
  Target: APOC3; (-) strand; PAM type: NRG; PAM sequence: GGG
gggttgagggcaggggtagg

SEQ ID NO: 8296 - DNA, 20 bp, Artificial Sequence
  Description of Artificial Sequence: Synthetic oligonucleotide
  Target: APOC3; (-) strand; PAM type: NRG; PAM sequence: GGG
ggggttgagggcaggggtag

SEQ ID NO: 8297 - DNA, 20 bp, Artificial Sequence
  Description of Artificial Sequence: Synthetic oligonucleotide
  Target: APOC3; (-) strand; PAM type: NRG; PAM sequence: GGG
tggggttgagggcaggggta

SEQ ID NO: 8298 - DNA, 20 bp, Artificial Sequence
  Description of Artificial Sequence: Synthetic oligonucleotide
  Target: APOC3; (-) strand; PAM type: NRG; PAM sequence: AGG
ctggggttgagggcaggggt

SEQ ID NO: 8299 - DNA, 20 bp, Artificial Sequence
  Description of Artificial Sequence: Synthetic oligonucleotide
  Target: APOC3; (-) strand; PAM type: NRG; PAM sequence: TAG
cctggggttgagggcagggg

SEQ ID NO: 8300 - DNA, 20 bp, Artificial Sequence
  Description of Artificial Sequence: Synthetic oligonucleotide
  Target: APOC3; (-) strand; PAM type: NRG; PAM sequence: GGG
cagcctggggttgagggcag

SEQ ID NO: 8301 - DNA, 20 bp, Artificial Sequence
  Description of Artificial Sequence: Synthetic oligonucleotide
  Target: APOC3; (-) strand; PAM type: NRG; PAM sequence: GGG
ccagcctggggttgagggca

SEQ ID NO: 8302 - DNA, 20 bp, Artificial Sequence
  Description of Artificial Sequence: Synthetic oligonucleotide
  Target: APOC3; (-) strand; PAM type: NRG; PAM sequence: AGG
cccagcctggggttgagggc

SEQ ID NO: 8303 - DNA, 20 bp, Artificial Sequence
  Description of Artificial Sequence: Synthetic oligonucleotide
  Target: APOC3; (-) strand; PAM type: NRG; PAM sequence: CAG
acccagcctggggttgaggg

SEQ ID NO: 8304 - DNA, 20 bp, Artificial Sequence
  Description of Artificial Sequence: Synthetic oligonucleotide
  Target: APOC3; (-) strand; PAM type: NRG; PAM sequence: GGG
aggacccagcctggggttga

SEQ ID NO: 8305 - DNA, 20 bp, Artificial Sequence
  Description of Artificial Sequence: Synthetic oligonucleotide
  Target: APOC3; (-) strand; PAM type: NRG; PAM sequence: AGG
aaggacccagcctggggttg

SEQ ID NO: 8306 - DNA, 20 bp, Artificial Sequence
  Description of Artificial Sequence: Synthetic oligonucleotide
  Target: APOC3; (-) strand; PAM type: NRG; PAM sequence: GAG
taaggacccagcctggggtt

SEQ ID NO: 8307 - DNA, 20 bp, Artificial Sequence
  Description of Artificial Sequence: Synthetic oligonucleotide
  Target: APOC3; (-) strand; PAM type: NRG; PAM sequence: GGG
taaagtaaggacccagcctg

SEQ ID NO: 8308 - DNA, 20 bp, Artificial Sequence
  Description of Artificial Sequence: Synthetic oligonucleotide
  Target: APOC3; (-) strand; PAM type: NRG; PAM sequence: GGG
ctaaagtaaggacccagcct

SEQ ID NO: 8309 - DNA, 20 bp, Artificial Sequence
  Description of Artificial Sequence: Synthetic oligonucleotide
  Target: APOC3; (-) strand; PAM type: NRG; PAM sequence: TGG
gctaaagtaaggacccagcc

SEQ ID NO: 8310 - DNA, 20 bp, Artificial Sequence
  Description of Artificial Sequence: Synthetic oligonucleotide
  Target: APOC3; (-) strand; PAM type: NRG; PAM sequence: CAG
aaacagctaaagtaaggacc

SEQ ID NO: 8311 - DNA, 20 bp, Artificial Sequence
  Description of Artificial Sequence: Synthetic oligonucleotide
  Target: APOC3; (-) strand; PAM type: NRG; PAM sequence: AGG
ttgggaaaacagctaaagta

SEQ ID NO: 8312 - DNA, 20 bp, Artificial Sequence
  Description of Artificial Sequence: Synthetic oligonucleotide
  Target: APOC3; (-) strand; PAM type: NRG; PAM sequence: AAG
cttgggaaaacagctaaagt

SEQ ID NO: 8313 - DNA, 20 bp, Artificial Sequence
  Description of Artificial Sequence: Synthetic oligonucleotide
  Target: APOC3; (-) strand; PAM type: NRG; PAM sequence: AAG
ccgccttgggaaaacagcta

SEQ ID NO: 8314 - DNA, 20 bp, Artificial Sequence
  Description of Artificial Sequence: Synthetic oligonucleotide
  Target: APOC3; (-) strand; PAM type: NRG; PAM sequence: CAG
aaggctccgccttgggaaaa

SEQ ID NO: 8315 - DNA, 20 bp, Artificial Sequence
  Description of Artificial Sequence: Synthetic oligonucleotide
  Target: APOC3; (-) strand; PAM type: NRG; PAM sequence: GGG
cagtttgaaggctccgcctt

SEQ ID NO: 8316 - DNA, 20 bp, Artificial Sequence
  Description of Artificial Sequence: Synthetic oligonucleotide
  Target: APOC3; (-) strand; PAM type: NRG; PAM sequence: TGG
ccagtttgaaggctccgcct

SEQ ID NO: 8317 - DNA, 20 bp, Artificial Sequence
  Description of Artificial Sequence: Synthetic oligonucleotide
  Target: APOC3; (-) strand; PAM type: NRG; PAM sequence: AGG
gactatgtgtcccagtttga

SEQ ID NO: 8318 - DNA, 20 bp, Artificial Sequence
  Description of Artificial Sequence: Synthetic oligonucleotide
  Target: APOC3; (-) strand; PAM type: NRG; PAM sequence: AAG
agactatgtgtcccagtttg

SEQ ID NO: 8319 - DNA, 20 bp, Artificial Sequence
  Description of Artificial Sequence: Synthetic oligonucleotide
  Target: APOC3; (-) strand; PAM type: NRG; PAM sequence: CAG
gcggcagagactatgtgtcc

SEQ ID NO: 8320 - DNA, 20 bp, Artificial Sequence
  Description of Artificial Sequence: Synthetic oligonucleotide
  Target: APOC3; (-) strand; PAM type: NRG; PAM sequence: GAG
tgtgctcaaagacagcggca

SEQ ID NO: 8321 - DNA, 20 bp, Artificial Sequence
  Description of Artificial Sequence: Synthetic oligonucleotide
  Target: APOC3; (-) strand; PAM type: NRG; PAM sequence: CAG
gatgtgctcaaagacagcgg

SEQ ID NO: 8322 - DNA, 20 bp, Artificial Sequence
  Description of Artificial Sequence: Synthetic oligonucleotide
  Target: APOC3; (-) strand; PAM type: NRG; PAM sequence: CGG
gtggatgtgctcaaagacag

SEQ ID NO: 8323 - DNA, 20 bp, Artificial Sequence
  Description of Artificial Sequence: Synthetic oligonucleotide
  Target: APOC3; (-) strand; PAM type: NRG; PAM sequence: CAG
tacgtggatgtgctcaaaga

SEQ ID NO: 8324 - DNA, 20 bp, Artificial Sequence
  Description of Artificial Sequence: Synthetic oligonucleotide
  Target: APOC3; (-) strand; PAM type: NRG; PAM sequence: AAG
tgtgtacgtggatgtgctca

SEQ ID NO: 8325 - DNA, 20 bp, Artificial Sequence
  Description of Artificial Sequence: Synthetic oligonucleotide
  Target: APOC3; (-) strand; PAM type: NRG; PAM sequence: TGG
ggacctggccactgtgtacg

SEQ ID NO: 8326 - DNA, 20 bp, Artificial Sequence
  Description of Artificial Sequence: Synthetic oligonucleotide
  Target: APOC3; (-) strand; PAM type: NRG; PAM sequence: TGG
ctgggatcgagtgaaggacc

SEQ ID NO: 8327 - DNA, 20 bp, Artificial Sequence
  Description of Artificial Sequence: Synthetic oligonucleotide
  Target: APOC3; (-) strand; PAM type: NRG; PAM sequence: AGG
gagcccctgggatcgagtga

SEQ ID NO: 8328 - DNA, 20 bp, Artificial Sequence
  Description of Artificial Sequence: Synthetic oligonucleotide
  Target: APOC3; (-) strand; PAM type: NRG; PAM sequence: AAG
agagcccctgggatcgagtg

SEQ ID NO: 8329 - DNA, 20 bp, Artificial Sequence
  Description of Artificial Sequence: Synthetic oligonucleotide
  Target: APOC3; (-) strand; PAM type: NRG; PAM sequence: GAG
cccccagagcccctgggatc

SEQ ID NO: 8330 - DNA, 20 bp, Artificial Sequence
  Description of Artificial Sequence: Synthetic oligonucleotide
  Target: APOC3; (-) strand; PAM type: NRG; PAM sequence: GGG
tgaacccccccagagcccct

SEQ ID NO: 8331 - DNA, 20 bp, Artificial Sequence
  Description of Artificial Sequence: Synthetic oligonucleotide
  Target: APOC3; (-) strand; PAM type: NRG; PAM sequence: TGG
atgaacccccccagagcccc

SEQ ID NO: 8332 - DNA, 20 bp, Artificial Sequence
  Description of Artificial Sequence: Synthetic oligonucleotide
  Target: APOC3; (-) strand; PAM type: NRG; PAM sequence: GAG
cagcaagatgaaccccccca

SEQ ID NO: 8333 - DNA, 20 bp, Artificial Sequence
  Description of Artificial Sequence: Synthetic oligonucleotide
  Target: APOC3; (-) strand; PAM type: NRG; PAM sequence: CAG
ggcagcaagatgaacccccc

SEQ ID NO: 8334 - DNA, 20 bp, Artificial Sequence
  Description of Artificial Sequence: Synthetic oligonucleotide
  Target: APOC3; (-) strand; PAM type: NRG; PAM sequence: AAG
ggctcggcatttctggcagc

SEQ ID NO: 8335 - DNA, 20 bp, Artificial Sequence
  Description of Artificial Sequence: Synthetic oligonucleotide
  Target: APOC3; (-) strand; PAM type: NRG; PAM sequence: CAG
gccaggctcggcatttctgg

SEQ ID NO: 8336 - DNA, 20 bp, Artificial Sequence
  Description of Artificial Sequence: Synthetic oligonucleotide
  Target: APOC3; (-) strand; PAM type: NRG; PAM sequence: TGG
ggagccaggctcggcatttc

SEQ ID NO: 8337 - DNA, 20 bp, Artificial Sequence
  Description of Artificial Sequence: Synthetic oligonucleotide
  Target: APOC3; (-) strand; PAM type: NRG; PAM sequence: CGG
caccctcagggagccaggct

SEQ ID NO: 8338 - DNA, 20 bp, Artificial Sequence
  Description of Artificial Sequence: Synthetic oligonucleotide
  Target: APOC3; (-) strand; PAM type: NRG; PAM sequence: AGG
cctcccaccctcagggagcc

SEQ ID NO: 8339 - DNA, 20 bp, Artificial Sequence
  Description of Artificial Sequence: Synthetic oligonucleotide
  Target: APOC3; (-) strand; PAM type: NRG; PAM sequence: CAG
ccctcccaccctcagggagc

SEQ ID NO: 8340 - DNA, 20 bp, Artificial Sequence
  Description of Artificial Sequence: Synthetic oligonucleotide
  Target: APOC3; (-) strand; PAM type: NRG; PAM sequence: GAG
tctcccctcccaccctcagg

SEQ ID NO: 8341 - DNA, 20 bp, Artificial Sequence
  Description of Artificial Sequence: Synthetic oligonucleotide
  Target: APOC3; (-) strand; PAM type: NRG; PAM sequence: GGG
ggtctcccctcccaccctca

SEQ ID NO: 8342 - DNA, 20 bp, Artificial Sequence
  Description of Artificial Sequence: Synthetic oligonucleotide
  Target: APOC3; (-) strand; PAM type: NRG; PAM sequence: AGG
gggtctcccctcccaccctc

SEQ ID NO: 8343 - DNA, 20 bp, Artificial Sequence
  Description of Artificial Sequence: Synthetic oligonucleotide
  Target: APOC3; (-) strand; PAM type: NRG; PAM sequence: CAG
tgggtctcccctcccaccct

SEQ ID NO: 8344 - DNA, 20 bp, Artificial Sequence
  Description of Artificial Sequence: Synthetic oligonucleotide
  Target: APOC3; (-) strand; PAM type: NRG; PAM sequence: GGG
gcccacagctggcctgatct

SEQ ID NO: 8345 - DNA, 20 bp, Artificial Sequence
  Description of Artificial Sequence: Synthetic oligonucleotide
  Target: APOC3; (-) strand; PAM type: NRG; PAM sequence: TGG
agcccacagctggcctgatc

SEQ ID NO: 8346 - DNA, 20 bp, Artificial Sequence
  Description of Artificial Sequence: Synthetic oligonucleotide
  Target: APOC3; (-) strand; PAM type: NRG; PAM sequence: TGG
ctcagatctcagcccacagc

SEQ ID NO: 8347 - DNA, 20 bp, Artificial Sequence
  Description of Artificial Sequence: Synthetic oligonucleotide
  Target: APOC3; (-) strand; PAM type: NRG; PAM sequence: CAG
tcggctcagatctcagccca

SEQ ID NO: 8348 - DNA, 20 bp, Artificial Sequence
  Description of Artificial Sequence: Synthetic oligonucleotide
  Target: APOC3; (-) strand; PAM type: NRG; PAM sequence: CAG
tggcctttcggctcagatct

SEQ ID NO: 8349 - DNA, 20 bp, Artificial Sequence
  Description of Artificial Sequence: Synthetic oligonucleotide
  Target: APOC3; (-) strand; PAM type: NRG; PAM sequence: CAG
ccaagcttggcctttcggct

SEQ ID NO: 8350 - DNA, 20 bp, Artificial Sequence
  Description of Artificial Sequence: Synthetic oligonucleotide
  Target: APOC3; (-) strand; PAM type: NRG; PAM sequence: CGG
cacctccaagcttggccttt

SEQ ID NO: 8351 - DNA, 20 bp, Artificial Sequence
  Description of Artificial Sequence: Synthetic oligonucleotide
  Target: APOC3; (-) strand; PAM type: NRG; PAM sequence: TGG
ctctcccccacctccaagct

SEQ ID NO: 8352 - DNA, 20 bp, Artificial Sequence
  Description of Artificial Sequence: Synthetic oligonucleotide
  Target: APOC3; (-) strand; PAM type: NRG; PAM sequence: AAG
gccccctctcccccacctcc

SEQ ID NO: 8353 - DNA, 20 bp, Artificial Sequence
  Description of Artificial Sequence: Synthetic oligonucleotide
  Target: APOC3; (-) strand; PAM type: NRG; PAM sequence: TGG
agaggcagcaggtttctcac

SEQ ID NO: 8354 - DNA, 20 bp, Artificial Sequence
  Description of Artificial Sequence: Synthetic oligonucleotide
  Target: APOC3; (-) strand; PAM type: NRG; PAM sequence: AGG
ccctcctgggcagaggcagc

SEQ ID NO: 8355 - DNA, 20 bp, Artificial Sequence
  Description of Artificial Sequence: Synthetic oligonucleotide
  Target: APOC3; (-) strand; PAM type: NRG; PAM sequence: CAG
accctcctgggcagaggcag

SEQ ID NO: 8356 - DNA, 20 bp, Artificial Sequence
  Description of Artificial Sequence: Synthetic oligonucleotide
  Target: APOC3; (-) strand; PAM type: NRG; PAM sequence: CAG
cccaccctcctgggcagagg

SEQ ID NO: 8357 - DNA, 20 bp, Artificial Sequence
  Description of Artificial Sequence: Synthetic oligonucleotide
  Target: APOC3; (-) strand; PAM type: NRG; PAM sequence: AGG
tggcccaccctcctgggcag

SEQ ID NO: 8358 - DNA, 20 bp, Artificial Sequence
  Description of Artificial Sequence: Synthetic oligonucleotide
  Target: APOC3; (-) strand; PAM type: NRG; PAM sequence: GAG
gtggcccaccctcctgggca

SEQ ID NO: 8359 - DNA, 20 bp, Artificial Sequence
  Description of Artificial Sequence: Synthetic oligonucleotide
  Target: APOC3; (-) strand; PAM type: NRG; PAM sequence: CAG
ccgtggcccaccctcctggg

SEQ ID NO: 8360 - DNA, 20 bp, Artificial Sequence
  Description of Artificial Sequence: Synthetic oligonucleotide
  Target: APOC3; (-) strand; PAM type: NRG; PAM sequence: GGG
tccccgtggcccaccctcct

SEQ ID NO: 8361 - DNA, 20 bp, Artificial Sequence
  Description of Artificial Sequence: Synthetic oligonucleotide
  Target: APOC3; (-) strand; PAM type: NRG; PAM sequence: TGG
atccccgtggcccaccctcc

SEQ ID NO: 8362 - DNA, 20 bp, Artificial Sequence
  Description of Artificial Sequence: Synthetic oligonucleotide
  Target: APOC3; (-) strand; PAM type: NRG; PAM sequence: TGG
gctttctccctaaatccccg

SEQ ID NO: 8363 - DNA, 20 bp, Artificial Sequence
  Description of Artificial Sequence: Synthetic oligonucleotide
  Target: APOC3; (-) strand; PAM type: NRG; PAM sequence: GGG
ctagggagccaaccatcggg

SEQ ID NO: 8364 - DNA, 20 bp, Artificial Sequence
  Description of Artificial Sequence: Synthetic oligonucleotide
  Target: APOC3; (-) strand; PAM type: NRG; PAM sequence: GGG
cctagggagccaaccatcgg

SEQ ID NO: 8365 - DNA, 20 bp, Artificial Sequence
  Description of Artificial Sequence: Synthetic oligonucleotide
  Target: APOC3; (-) strand; PAM type: NRG; PAM sequence: GGG
acctagggagccaaccatcg

SEQ ID NO: 8366 - DNA, 20 bp, Artificial Sequence
  Description of Artificial Sequence: Synthetic oligonucleotide
  Target: APOC3; (-) strand; PAM type: NRG; PAM sequence: GGG
aacctagggagccaaccatc

SEQ ID NO: 8367 - DNA, 20 bp, Artificial Sequence
  Description of Artificial Sequence: Synthetic oligonucleotide
  Target: APOC3; (-) strand; PAM type: NRG; PAM sequence: CGG
taacctagggagccaaccat

SEQ ID NO: 8368 - DNA, 20 bp, Artificial Sequence
  Description of Artificial Sequence: Synthetic oligonucleotide
  Target: APOC3; (-) strand; PAM type: NRG; PAM sequence: GAG
taggtgtcccctaacctagg

SEQ ID NO: 8369 - DNA, 20 bp, Artificial Sequence
  Description of Artificial Sequence: Synthetic oligonucleotide
  Target: APOC3; (-) strand; PAM type: NRG; PAM sequence: GGG
ggtaggtgtcccctaaccta

SEQ ID NO: 8370 - DNA, 20 bp, Artificial Sequence
  Description of Artificial Sequence: Synthetic oligonucleotide
  Target: APOC3; (-) strand; PAM type: NRG; PAM sequence: AGG
gggtaggtgtcccctaacct

SEQ ID NO: 8371 - DNA, 20 bp, Artificial Sequence
  Description of Artificial Sequence: Synthetic oligonucleotide
  Target: APOC3; (-) strand; PAM type: NRG; PAM sequence: TAG
cgggtaggtgtcccctaacc

SEQ ID NO: 8372 - DNA, 20 bp, Artificial Sequence
  Description of Artificial Sequence: Synthetic oligonucleotide
  Target: APOC3; (-) strand; PAM type: NRG; PAM sequence: AGG
ccgtgctcttcctgacgggt

SEQ ID NO: 8373 - DNA, 20 bp, Artificial Sequence
  Description of Artificial Sequence: Synthetic oligonucleotide
  Target: APOC3; (-) strand; PAM type: NRG; PAM sequence: TAG
gccgtgctcttcctgacggg

SEQ ID NO: 8374 - DNA, 20 bp, Artificial Sequence
  Description of Artificial Sequence: Synthetic oligonucleotide
  Target: APOC3; (-) strand; PAM type: NRG; PAM sequence: GGG
ttggccgtgctcttcctgac

SEQ ID NO: 8375 - DNA, 20 bp, Artificial Sequence
  Description of Artificial Sequence: Synthetic oligonucleotide
  Target: APOC3; (-) strand; PAM type: NRG; PAM sequence: CGG
cttggccgtgctcttcctga

SEQ ID NO: 8376 - DNA, 20 bp, Artificial Sequence
  Description of Artificial Sequence: Synthetic oligonucleotide
  Target: APOC3; (-) strand; PAM type: NRG; PAM sequence: TGG
gaaagctgcggtgctgacct

SEQ ID NO: 8377 - DNA, 20 bp, Artificial Sequence
  Description of Artificial Sequence: Synthetic oligonucleotide
  Target: APOC3; (-) strand; PAM type: NRG; PAM sequence: CGG
gcccttcaggatgaaagctg

SEQ ID NO: 8378 - DNA, 20 bp, Artificial Sequence
  Description of Artificial Sequence: Synthetic oligonucleotide
  Target: APOC3; (-) strand; PAM type: NRG; PAM sequence: AAG
cccacggcccttcaggatga

SEQ ID NO: 8379 - DNA, 20 bp, Artificial Sequence
  Description of Artificial Sequence: Synthetic oligonucleotide
  Target: APOC3; (-) strand; PAM type: NRG; PAM sequence: AGG
caggtcccccacggcccttc

SEQ ID NO: 8380 - DNA, 20 bp, Artificial Sequence
  Description of Artificial Sequence: Synthetic oligonucleotide
  Target: APOC3; (-) strand; PAM type: NRG; PAM sequence: CAG
ccaggtcccccacggccctt

SEQ ID NO: 8381 - DNA, 20 bp, Artificial Sequence
  Description of Artificial Sequence: Synthetic oligonucleotide
  Target: APOC3; (-) strand; PAM type: NRG; PAM sequence: CGG
cttctcctccaggtccccca

SEQ ID NO: 8382 - DNA, 20 bp, Artificial Sequence
  Description of Artificial Sequence: Synthetic oligonucleotide
  Target: APOC3; (-) strand; PAM type: NRG; PAM sequence: AGG
ccaggcccttcttctcctcc

SEQ ID NO: 8383 - DNA, 20 bp, Artificial Sequence
  Description of Artificial Sequence: Synthetic oligonucleotide
  Target: APOC3; (-) strand; PAM type: NRG; PAM sequence: CAG
gccaggcccttcttctcctc

SEQ ID NO: 8384 - DNA, 20 bp, Artificial Sequence
  Description of Artificial Sequence: Synthetic oligonucleotide
  Target: APOC3; (-) strand; PAM type: NRG; PAM sequence: AGG
tgaaggcaccccactcagcc

SEQ ID NO: 8385 - DNA, 20 bp, Artificial Sequence
  Description of Artificial Sequence: Synthetic oligonucleotide
  Target: APOC3; (-) strand; PAM type: NRG; PAM sequence: CAG
ctgaaggcaccccactcagc

SEQ ID NO: 8386 - DNA, 20 bp, Artificial Sequence
  Description of Artificial Sequence: Synthetic oligonucleotide
  Target: APOC3; (-) strand; PAM type: NRG; PAM sequence: CAG
catgctgaaggcaccccact

SEQ ID NO: 8387 - DNA, 20 bp, Artificial Sequence
  Description of Artificial Sequence: Synthetic oligonucleotide
  Target: APOC3; (-) strand; PAM type: NRG; PAM sequence: AGG
acggggcttctgcatgctga

SEQ ID NO: 8388 - DNA, 20 bp, Artificial Sequence
  Description of Artificial Sequence: Synthetic oligonucleotide
  Target: APOC3; (-) strand; PAM type: NRG; PAM sequence: AAG
cacggggcttctgcatgctg

SEQ ID NO: 8389 - DNA, 20 bp, Artificial Sequence
  Description of Artificial Sequence: Synthetic oligonucleotide
  Target: APOC3; (-) strand; PAM type: NRG; PAM sequence: GGG
gcaatgagtgggggagcacg

SEQ ID NO: 8390 - DNA, 20 bp, Artificial Sequence
  Description of Artificial Sequence: Synthetic oligonucleotide
  Target: APOC3; (-) strand; PAM type: NRG; PAM sequence: GGG
tgcaatgagtgggggagcac

SEQ ID NO: 8391 - DNA, 20 bp, Artificial Sequence
  Description of Artificial Sequence: Synthetic oligonucleotide
  Target: APOC3; (-) strand; PAM type: NRG; PAM sequence: CGG
ctgcaatgagtgggggagca

SEQ ID NO: 8392 - DNA, 20 bp, Artificial Sequence
  Description of Artificial Sequence: Synthetic oligonucleotide
  Target: APOC3; (-) strand; PAM type: NRG; PAM sequence: GAG
cctggctgcaatgagtgggg

SEQ ID NO: 8393 - DNA, 20 bp, Artificial Sequence
  Description of Artificial Sequence: Synthetic oligonucleotide
  Target: APOC3; (-) strand; PAM type: NRG; PAM sequence: GGG
cacctggctgcaatgagtgg

SEQ ID NO: 8394 - DNA, 20 bp, Artificial Sequence
  Description of Artificial Sequence: Synthetic oligonucleotide
  Target: APOC3; (-) strand; PAM type: NRG; PAM sequence: GGG
tcacctggctgcaatgagtg

SEQ ID NO: 8395 - DNA, 20 bp, Artificial Sequence
  Description of Artificial Sequence: Synthetic oligonucleotide
  Target: APOC3; (-) strand; PAM type: NRG; PAM sequence: GGG
ctcacctggctgcaatgagt

SEQ ID NO: 8396 - DNA, 20 bp, Artificial Sequence
  Description of Artificial Sequence: Synthetic oligonucleotide
  Target: APOC3; (-) strand; PAM type: NRG; PAM sequence: TGG
cctcacctggctgcaatgag

SEQ ID NO: 8397 - DNA, 20 bp, Artificial Sequence
  Description of Artificial Sequence: Synthetic oligonucleotide
  Target: APOC3; (-) strand; PAM type: NRG; PAM sequence: GAG
tctcctcacctggctgcaat

SEQ ID NO: 8398 - DNA, 20 bp, Artificial Sequence
  Description of Artificial Sequence: Synthetic oligonucleotide
  Target: APOC3; (-) strand; PAM type: NRG; PAM sequence: TGG
tctgtgcccttctcctcacc

SEQ ID NO: 8399 - DNA, 20 bp, Artificial Sequence
  Description of Artificial Sequence: Synthetic oligonucleotide
  Target: APOC3; (-) strand; PAM type: NRG; PAM sequence: AGG
gccgggcctctgggtacctg

SEQ ID NO: 8400 - DNA, 20 bp, Artificial Sequence
  Description of Artificial Sequence: Synthetic oligonucleotide
  Target: APOC3; (-) strand; PAM type: NRG; PAM sequence: GAG
ggccgggcctctgggtacct

SEQ ID NO: 8401 - DNA, 20 bp, Artificial Sequence
  Description of Artificial Sequence: Synthetic oligonucleotide
  Target: APOC3; (-) strand; PAM type: NRG; PAM sequence: GGG
ttgccccaggccgggcctct

SEQ ID NO: 8402 - DNA, 20 bp, Artificial Sequence
  Description of Artificial Sequence: Synthetic oligonucleotide
  Target: APOC3; (-) strand; PAM type: NRG; PAM sequence: TGG
cttgccccaggccgggcctc

SEQ ID NO: 8403 - DNA, 20 bp, Artificial Sequence
  Description of Artificial Sequence: Synthetic oligonucleotide
  Target: APOC3; (-) strand; PAM type: NRG; PAM sequence: GGG
ttcaggccttgccccaggcc

SEQ ID NO: 8404 - DNA, 20 bp, Artificial Sequence
  Description of Artificial Sequence: Synthetic oligonucleotide
  Target: APOC3; (-) strand; PAM type: NRG; PAM sequence: CGG
gttcaggccttgccccaggc

SEQ ID NO: 8405 - DNA, 20 bp, Artificial Sequence
  Description of Artificial Sequence: Synthetic oligonucleotide
  Target: APOC3; (-) strand; PAM type: NRG; PAM sequence: AGG
caaggttcaggccttgcccc

SEQ ID NO: 8406 - DNA, 20 bp, Artificial Sequence
  Description of Artificial Sequence: Synthetic oligonucleotide
  Target: APOC3; (-) strand; PAM type: NRG; PAM sequence: CAG
tcaaggttcaggccttgccc

SEQ ID NO: 8407 - DNA, 20 bp, Artificial Sequence
  Description of Artificial Sequence: Synthetic oligonucleotide
  Target: APOC3; (-) strand; PAM type: NRG; PAM sequence: AGG
ggctccccagctcaaggttc

SEQ ID NO: 8408 - DNA, 20 bp, Artificial Sequence
  Description of Artificial Sequence: Synthetic oligonucleotide
  Target: APOC3; (-) strand; PAM type: NRG; PAM sequence: CAG
tggctccccagctcaaggtt

SEQ ID NO: 8409 - DNA, 20 bp, Artificial Sequence
  Description of Artificial Sequence: Synthetic oligonucleotide
  Target: APOC3; (-) strand; PAM type: NRG; PAM sequence: AGG
cactctggctccccagctca

SEQ ID NO: 8410 - DNA, 20 bp, Artificial Sequence
  Description of Artificial Sequence: Synthetic oligonucleotide
  Target: APOC3; (-) strand; PAM type: NRG; PAM sequence: AAG
tcactctggctccccagctc

SEQ ID NO: 8411 - DNA, 20 bp, Artificial Sequence
  Description of Artificial Sequence: Synthetic oligonucleotide
  Target: APOC3; (-) strand; PAM type: NRG; PAM sequence: CAG
ccccggtcactctggctccc

SEQ ID NO: 8412 - DNA, 20 bp, Artificial Sequence
  Description of Artificial Sequence: Synthetic oligonucleotide
  Target: APOC3; (-) strand; PAM type: NRG; PAM sequence: TGG
gctgcctgccccggtcactc

SEQ ID NO: 8413 - DNA, 20 bp, Artificial Sequence
  Description of Artificial Sequence: Synthetic oligonucleotide
  Target: APOC3; (-) strand; PAM type: NRG; PAM sequence: CGG
gtgcgtcctgctgcctgccc

SEQ ID NO: 8414 - DNA, 20 bp, Artificial Sequence
  Description of Artificial Sequence: Synthetic oligonucleotide
  Target: APOC3; (-) strand; PAM type: NRG; PAM sequence: AGG
gcttagagactgcgagaagg

SEQ ID NO: 8415 - DNA, 20 bp, Artificial Sequence
  Description of Artificial Sequence: Synthetic oligonucleotide
  Target: APOC3; (-) strand; PAM type: NRG; PAM sequence: GAG
tgcttagagactgcgagaag

SEQ ID NO: 8416 - DNA, 20 bp, Artificial Sequence
  Description of Artificial Sequence: Synthetic oligonucleotide
  Target: APOC3; (-) strand; PAM type: NRG; PAM sequence: AGG
gctgcttagagactgcgaga

SEQ ID NO: 8417 - DNA, 20 bp, Artificial Sequence
  Description of Artificial Sequence: Synthetic oligonucleotide
  Target: APOC3; (-) strand; PAM type: NRG; PAM sequence: AAG
ggctgcttagagactgcgag

SEQ ID NO: 8418 - DNA, 20 bp, Artificial Sequence
  Description of Artificial Sequence: Synthetic oligonucleotide
  Target: APOC3; (-) strand; PAM type: NRG; PAM sequence: GAG
gctggctgcttagagactgc

SEQ ID NO: 8419 - DNA, 20 bp, Artificial Sequence
  Description of Artificial Sequence: Synthetic oligonucleotide
  Target: APOC3; (-) strand; PAM type: NRG; PAM sequence: GAG
ctgcaagagctggctgctta

SEQ ID NO: 8420 - DNA, 20 bp, Artificial Sequence
  Description of Artificial Sequence: Synthetic oligonucleotide
  Target: APOC3; (-) strand; PAM type: NRG; PAM sequence: TAG
ccctgcaagagctggctgct

SEQ ID NO: 8421 - DNA, 20 bp, Artificial Sequence
  Description of Artificial Sequence: Synthetic oligonucleotide
  Target: APOC3; (-) strand; PAM type: NRG; PAM sequence: TGG
taaataggccctgcaagagc

SEQ ID NO: 8422 - DNA, 20 bp, Artificial Sequence
  Description of Artificial Sequence: Synthetic oligonucleotide
  Target: APOC3; (-) strand; PAM type: NRG; PAM sequence: GAG
gacataaataggccctgcaa

SEQ ID NO: 8423 - DNA, 20 bp, Artificial Sequence
  Description of Artificial Sequence: Synthetic oligonucleotide
  Target: APOC3; (-) strand; PAM type: NRG; PAM sequence: AAG
cagacataaataggccctgc

SEQ ID NO: 8424 - DNA, 20 bp, Artificial Sequence
  Description of Artificial Sequence: Synthetic oligonucleotide
  Target: APOC3; (-) strand; PAM type: NRG; PAM sequence: AGG
ccctggctgcagacataaat

SEQ ID NO: 8425 - DNA, 20 bp, Artificial Sequence
  Description of Artificial Sequence: Synthetic oligonucleotide
  Target: APOC3; (-) strand; PAM type: NRG; PAM sequence: TAG
accctggctgcagacataaa

SEQ ID NO: 8426 - DNA, 20 bp, Artificial Sequence
  Description of Artificial Sequence: Synthetic oligonucleotide
  Target: APOC3; (-) strand; PAM type: NRG; PAM sequence: CAG
cccagcccagaccctggctg

SEQ ID NO: 8427 - DNA, 20 bp, Artificial Sequence
  Description of Artificial Sequence: Synthetic oligonucleotide
  Target: APOC3; (-) strand; PAM type: NRG; PAM sequence: TGG
cagcctcccagcccagaccc

SEQ ID NO: 8428 - DNA, 20 bp, Artificial Sequence
  Description of Artificial Sequence: Synthetic oligonucleotide
  Target: APOC3; (-) strand; PAM type: NRG; PAM sequence: CAG
ggcttatcagcctcccagcc

SEQ ID NO: 8429 - DNA, 20 bp, Artificial Sequence
  Description of Artificial Sequence: Synthetic oligonucleotide
  Target: APOC3; (-) strand; PAM type: NRG; PAM sequence: CAG
ggctgggcttatcagcctcc

SEQ ID NO: 8430 - DNA, 20 bp, Artificial Sequence
  Description of Artificial Sequence: Synthetic oligonucleotide
  Target: APOC3; (-) strand; PAM type: NRG; PAM sequence: CAG
agggccggggctgggcttat

SEQ ID NO: 8431 - DNA, 20 bp, Artificial Sequence
  Description of Artificial Sequence: Synthetic oligonucleotide
  Target: APOC3; (-) strand; PAM type: NRG; PAM sequence: GGG
gcagcaacagggccggggct

SEQ ID NO: 8432 - DNA, 20 bp, Artificial Sequence
  Description of Artificial Sequence: Synthetic oligonucleotide
  Target: APOC3; (-) strand; PAM type: NRG; PAM sequence: TGG
agcagcaacagggccggggc

SEQ ID NO: 8433 - DNA, 20 bp, Artificial Sequence
  Description of Artificial Sequence: Synthetic oligonucleotide
  Target: APOC3; (-) strand; PAM type: NRG; PAM sequence: GGG
agtgagcagcaacagggccg

SEQ ID NO: 8434 - DNA, 20 bp, Artificial Sequence
  Description of Artificial Sequence: Synthetic oligonucleotide
  Target: APOC3; (-) strand; PAM type: NRG; PAM sequence: GGG
cagtgagcagcaacagggcc

SEQ ID NO: 8435 - DNA, 20 bp, Artificial Sequence
  Description of Artificial Sequence: Synthetic oligonucleotide
  Target: APOC3; (-) strand; PAM type: NRG; PAM sequence: CGG
ccagtgagcagcaacagggc

SEQ ID NO: 8436 - DNA, 20 bp, Artificial Sequence
  Description of Artificial Sequence: Synthetic oligonucleotide
  Target: APOC3; (-) strand; PAM type: NRG; PAM sequence: GGG
aggaccagtgagcagcaaca

SEQ ID NO: 8437 - DNA, 20 bp, Artificial Sequence
  Description of Artificial Sequence: Synthetic oligonucleotide
  Target: APOC3; (-) strand; PAM type: NRG; PAM sequence: AGG
caggaccagtgagcagcaac

SEQ ID NO: 8438 - DNA, 20 bp, Artificial Sequence
  Description of Artificial Sequence: Synthetic oligonucleotide
  Target: APOC3; (-) strand; PAM type: NRG; PAM sequence: CAG
ccaggaccagtgagcagcaa

SEQ ID NO: 8439 - DNA, 20 bp, Artificial Sequence
  Description of Artificial Sequence: Synthetic oligonucleotide
  Target: APOC3; (-) strand; PAM type: NRG; PAM sequence: CAG
acattgccaggaccagtgag

SEQ ID NO: 8440 - DNA, 20 bp, Artificial Sequence
  Description of Artificial Sequence: Synthetic oligonucleotide
  Target: APOC3; (-) strand; PAM type: NRG; PAM sequence: GAG
tccacattgccaggaccagt

SEQ ID NO: 8441 - DNA, 20 bp, Artificial Sequence
  Description of Artificial Sequence: Synthetic oligonucleotide
  Target: APOC3; (-) strand; PAM type: NRG; PAM sequence: CAG
aagttccacattgccaggac

SEQ ID NO: 8442 - DNA, 20 bp, Artificial Sequence
  Description of Artificial Sequence: Synthetic oligonucleotide
  Target: APOC3; (-) strand; PAM type: NRG; PAM sequence: AGG
ctcttaagttccacattgcc

SEQ ID NO: 8443 - DNA, 20 bp, Artificial Sequence
  Description of Artificial Sequence: Synthetic oligonucleotide
  Target: APOC3; (-) strand; PAM type: NRG; PAM sequence: CAG
actcttaagttccacattgc

SEQ ID NO: 8444 - DNA, 20 bp, Artificial Sequence
  Description of Artificial Sequence: Synthetic oligonucleotide
  Target: APOC3; (-) strand; PAM type: NRG; PAM sequence: AAG
gagctgatccttgaactctt

SEQ ID NO: 8445 - DNA, 20 bp, Artificial Sequence
  Description of Artificial Sequence: Synthetic oligonucleotide
  Target: APOC3; (-) strand; PAM type: NRG; PAM sequence: GAG
tttgcccagccccagggaca

SEQ ID NO: 8446 - DNA, 20 bp, Artificial Sequence
  Description of Artificial Sequence: Synthetic oligonucleotide
  Target: APOC3; (-) strand; PAM type: NRG; PAM sequence: CAG
tatttgcccagccccaggga

SEQ ID NO: 8447 - DNA, 20 bp, Artificial Sequence
  Description of Artificial Sequence: Synthetic oligonucleotide
  Target: APOC3; (-) strand; PAM type: NRG; PAM sequence: GGG
actctatttgcccagcccca

SEQ ID NO: 8448 - DNA, 20 bp, Artificial Sequence
  Description of Artificial Sequence: Synthetic oligonucleotide
  Target: APOC3; (-) strand; PAM type: NRG; PAM sequence: AGG
cactctatttgcccagcccc

SEQ ID NO: 8449 - DNA, 20 bp, Artificial Sequence
  Description of Artificial Sequence: Synthetic oligonucleotide
  Target: APOC3; (-) strand; PAM type: NRG; PAM sequence: CAG
ccactctatttgcccagccc

SEQ ID NO: 8450 - DNA, 20 bp, Artificial Sequence
  Description of Artificial Sequence: Synthetic oligonucleotide
  Target: APOC3; (-) strand; PAM type: NRG; PAM sequence: CAG
gtttgcccactctatttgcc

SEQ ID NO: 8451 - DNA, 20 bp, Artificial Sequence
  Description of Artificial Sequence: Synthetic oligonucleotide
  Target: APOC3; (-) strand; PAM type: NRG; PAM sequence: CAG
cccctgccctgcagcccccg

SEQ ID NO: 8452 - DNA, 20 bp, Artificial Sequence
  Description of Artificial Sequence: Synthetic oligonucleotide
  Target: APOC3; (-) strand; PAM type: NRG; PAM sequence: CAG
aacccttgacccctgccctg

SEQ ID NO: 8453 - DNA, 20 bp, Artificial Sequence
  Description of Artificial Sequence: Synthetic oligonucleotide
  Target: APOC3; (-) strand; PAM type: NRG; PAM sequence: CAG
ccgggagacctgcaagcctg

SEQ ID NO: 8454 - DNA, 20 bp, Artificial Sequence
  Description of Artificial Sequence: Synthetic oligonucleotide
  Target: APOC3; (-) strand; PAM type: NRG; PAM sequence: AAG
accccacccgggagacctgc

SEQ ID NO: 8455 - DNA, 20 bp, Artificial Sequence
  Description of Artificial Sequence: Synthetic oligonucleotide
  Target: APOC3; (-) strand; PAM type: NRG; PAM sequence: GAG
ggaaccccgaccccacccgg

SEQ ID NO: 8456 - DNA, 20 bp, Artificial Sequence
  Description of Artificial Sequence: Synthetic oligonucleotide
  Target: APOC3; (-) strand; PAM type: NRG; PAM sequence: GGG
agggaaccccgaccccaccc

SEQ ID NO: 8457 - DNA, 20 bp, Artificial Sequence
  Description of Artificial Sequence: Synthetic oligonucleotide
  Target: APOC3; (-) strand; PAM type: NRG; PAM sequence: CGG
cagggaaccccgaccccacc

SEQ ID NO: 8458 - DNA, 20 bp, Artificial Sequence
  Description of Artificial Sequence: Synthetic oligonucleotide
  Target: APOC3; (-) strand; PAM type: NRG; PAM sequence: GGG
aggggaaggggatgagtgca

SEQ ID NO: 8459 - DNA, 20 bp, Artificial Sequence
  Description of Artificial Sequence: Synthetic oligonucleotide
  Target: APOC3; (-) strand; PAM type: NRG; PAM sequence: AGG
gaggggaaggggatgagtgc

SEQ ID NO: 8460 - DNA, 20 bp, Artificial Sequence
  Description of Artificial Sequence: Synthetic oligonucleotide
  Target: APOC3; (-) strand; PAM type: NRG; PAM sequence: CAG
ggaggggaaggggatgagtg

SEQ ID NO: 8461 - DNA, 20 bp, Artificial Sequence
  Description of Artificial Sequence: Synthetic oligonucleotide
  Target: APOC3; (-) strand; PAM type: NRG; PAM sequence: GAG
cccatggaggggaaggggat

SEQ ID NO: 8462 - DNA, 20 bp, Artificial Sequence
  Description of Artificial Sequence: Synthetic oligonucleotide
  Target: APOC3; (-) strand; PAM type: NRG; PAM sequence: GGG
acactcccatggaggggaag

SEQ ID NO: 8463 - DNA, 20 bp, Artificial Sequence
  Description of Artificial Sequence: Synthetic oligonucleotide
  Target: APOC3; (-) strand; PAM type: NRG; PAM sequence: GGG
cacactcccatggaggggaa

SEQ ID NO: 8464 - DNA, 20 bp, Artificial Sequence
  Description of Artificial Sequence: Synthetic oligonucleotide
  Target: APOC3; (-) strand; PAM type: NRG; PAM sequence: AGG
acacactcccatggagggga

SEQ ID NO: 8465 - DNA, 20 bp, Artificial Sequence
  Description of Artificial Sequence: Synthetic oligonucleotide
  Target: APOC3; (-) strand; PAM type: NRG; PAM sequence: AAG
cacacactcccatggagggg

SEQ ID NO: 8466 - DNA, 20 bp, Artificial Sequence
  Description of Artificial Sequence: Synthetic oligonucleotide
  Target: APOC3; (-) strand; PAM type: NRG; PAM sequence: GGG
gcccacacactcccatggag

SEQ ID NO: 8467 - DNA, 20 bp, Artificial Sequence
  Description of Artificial Sequence: Synthetic oligonucleotide
  Target: APOC3; (-) strand; PAM type: NRG; PAM sequence: GGG
tgcccacacactcccatgga

SEQ ID NO: 8468 - DNA, 20 bp, Artificial Sequence
  Description of Artificial Sequence: Synthetic oligonucleotide
  Target: APOC3; (-) strand; PAM type: NRG; PAM sequence: AGG
ctgcccacacactcccatgg

SEQ ID NO: 8469 - DNA, 20 bp, Artificial Sequence
  Description of Artificial Sequence: Synthetic oligonucleotide
  Target: APOC3; (-) strand; PAM type: NRG; PAM sequence: GAG
actgcccacacactcccatg

SEQ ID NO: 8470 - DNA, 20 bp, Artificial Sequence
  Description of Artificial Sequence: Synthetic oligonucleotide
  Target: APOC3; (-) strand; PAM type: NRG; PAM sequence: TGG
caactgcccacacactccca

SEQ ID NO: 8471 - DNA, 20 bp, Artificial Sequence
  Description of Artificial Sequence: Synthetic oligonucleotide
  Target: APOC3; (-) strand; PAM type: NRG; PAM sequence: TGG
tctgccaacacaatggacaa

SEQ ID NO: 8472 - DNA, 20 bp, Artificial Sequence
  Description of Artificial Sequence: Synthetic oligonucleotide
  Target: APOC3; (-) strand; PAM type: NRG; PAM sequence: TGG
cccctcctctgccaacacaa

SEQ ID NO: 8473 - DNA, 20 bp, Artificial Sequence
  Description of Artificial Sequence: Synthetic oligonucleotide
  Target: APOC3; (-) strand; PAM type: NRG; PAM sequence: CAG
tctccttggtggaggagtcc

SEQ ID NO: 8474 - DNA, 20 bp, Artificial Sequence
  Description of Artificial Sequence: Synthetic oligonucleotide
  Target: APOC3; (-) strand; PAM type: NRG; PAM sequence: GAG
aggcagtctccttggtggag

SEQ ID NO: 8475 - DNA, 20 bp, Artificial Sequence
  Description of Artificial Sequence: Synthetic oligonucleotide
  Target: APOC3; (-) strand; PAM type: NRG; PAM sequence: AGG
ggaggcagtctccttggtgg

SEQ ID NO: 8476 - DNA, 20 bp, Artificial Sequence
  Description of Artificial Sequence: Synthetic oligonucleotide
  Target: APOC3; (-) strand; PAM type: NRG; PAM sequence: GAG
gggaggcagtctccttggtg

SEQ ID NO: 8477 - DNA, 20 bp, Artificial Sequence
  Description of Artificial Sequence: Synthetic oligonucleotide
  Target: APOC3; (-) strand; PAM type: NRG; PAM sequence: TGG
gggggaggcagtctccttgg

SEQ ID NO: 8478 - DNA, 20 bp, Artificial Sequence
  Description of Artificial Sequence: Synthetic oligonucleotide
  Target: APOC3; (-) strand; PAM type: NRG; PAM sequence: TGG
ggtgggggaggcagtctcct

SEQ ID NO: 8479 - DNA, 20 bp, Artificial Sequence
  Description of Artificial Sequence: Synthetic oligonucleotide
  Target: APOC3; (-) strand; PAM type: NRG; PAM sequence: CAG
aatgctggtggtgggggagg

SEQ ID NO: 8480 - DNA, 20 bp, Artificial Sequence
  Description of Artificial Sequence: Synthetic oligonucleotide
  Target: APOC3; (-) strand; PAM type: NRG; PAM sequence: AGG
tggaatgctggtggtggggg

SEQ ID NO: 8481 - DNA, 20 bp, Artificial Sequence
  Description of Artificial Sequence: Synthetic oligonucleotide
  Target: APOC3; (-) strand; PAM type: NRG; PAM sequence: GAG
ctggaatgctggtggtgggg

SEQ ID NO: 8482 - DNA, 20 bp, Artificial Sequence
  Description of Artificial Sequence: Synthetic oligonucleotide
  Target: APOC3; (-) strand; PAM type: NRG; PAM sequence: GGG
ccctggaatgctggtggtgg

SEQ ID NO: 8483 - DNA, 20 bp, Artificial Sequence
  Description of Artificial Sequence: Synthetic oligonucleotide
  Target: APOC3; (-) strand; PAM type: NRG; PAM sequence: GGG
tccctggaatgctggtggtg

SEQ ID NO: 8484 - DNA, 20 bp, Artificial Sequence
  Description of Artificial Sequence: Synthetic oligonucleotide
  Target: APOC3; (-) strand; PAM type: NRG; PAM sequence: GGG
ctccctggaatgctggtggt

SEQ ID NO: 8485 - DNA, 20 bp, Artificial Sequence
  Description of Artificial Sequence: Synthetic oligonucleotide
  Target: APOC3; (-) strand; PAM type: NRG; PAM sequence: TGG
tctccctggaatgctggtgg

SEQ ID NO: 8486 - DNA, 20 bp, Artificial Sequence
  Description of Artificial Sequence: Synthetic oligonucleotide
  Target: APOC3; (-) strand; PAM type: NRG; PAM sequence: TGG
tagtctccctggaatgctgg

SEQ ID NO: 8487 - DNA, 20 bp, Artificial Sequence
  Description of Artificial Sequence: Synthetic oligonucleotide
  Target: APOC3; (-) strand; PAM type: NRG; PAM sequence: TGG
aagtagtctccctggaatgc

SEQ ID NO: 8488 - DNA, 20 bp, Artificial Sequence
  Description of Artificial Sequence: Synthetic oligonucleotide
  Target: APOC3; (-) strand; PAM type: NRG; PAM sequence: TGG
ggggagtgaagtagtctccc

SEQ ID NO: 8489 - DNA, 20 bp, Artificial Sequence
  Description of Artificial Sequence: Synthetic oligonucleotide
  Target: APOC3; (-) strand; PAM type: NRG; PAM sequence: TAG
gaagggggaggggagtgaag

SEQ ID NO: 8490 - DNA, 20 bp, Artificial Sequence
  Description of Artificial Sequence: Synthetic oligonucleotide
  Target: APOC3; (-) strand; PAM type: NRG; PAM sequence: AAG
ggggaagggggaggggagtg

SEQ ID NO: 8491 - DNA, 20 bp, Artificial Sequence
  Description of Artificial Sequence: Synthetic oligonucleotide
  Target: APOC3; (-) strand; PAM type: NRG; PAM sequence: GAG
gggcgggggaagggggaggg

SEQ ID NO: 8492 - DNA, 20 bp, Artificial Sequence
  Description of Artificial Sequence: Synthetic oligonucleotide
  Target: APOC3; (-) strand; PAM type: NRG; PAM sequence: GGG
cagggcgggggaagggggag

SEQ ID NO: 8493 - DNA, 20 bp, Artificial Sequence
  Description of Artificial Sequence: Synthetic oligonucleotide
  Target: APOC3; (-) strand; PAM type: NRG; PAM sequence: GGG
acagggcgggggaaggggga

SEQ ID NO: 8494 - DNA, 20 bp, Artificial Sequence
  Description of Artificial Sequence: Synthetic oligonucleotide
  Target: APOC3; (-) strand; PAM type: NRG; PAM sequence: AGG
gacagggcgggggaaggggg

SEQ ID NO: 8495 - DNA, 20 bp, Artificial Sequence
  Description of Artificial Sequence: Synthetic oligonucleotide
  Target: APOC3; (-) strand; PAM type: NRG; PAM sequence: GAG
ggacagggcgggggaagggg

SEQ ID NO: 8496 - DNA, 20 bp, Artificial Sequence
  Description of Artificial Sequence: Synthetic oligonucleotide
  Target: APOC3; (-) strand; PAM type: NRG; PAM sequence: GGG
gaggacagggcgggggaagg

SEQ ID NO: 8497 - DNA, 20 bp, Artificial Sequence
  Description of Artificial Sequence: Synthetic oligonucleotide
  Target: APOC3; (-) strand; PAM type: NRG; PAM sequence: GGG
ggaggacagggcgggggaag

SEQ ID NO: 8498 - DNA, 20 bp, Artificial Sequence
  Description of Artificial Sequence: Synthetic oligonucleotide
  Target: APOC3; (-) strand; PAM type: NRG; PAM sequence: GGG
gggaggacagggcgggggaa

SEQ ID NO: 8499 - DNA, 20 bp, Artificial Sequence
  Description of Artificial Sequence: Synthetic oligonucleotide
  Target: APOC3; (+) strand; PAM type: NRG; PAM sequence: CAG
ttcacgccattctcctgcct

SEQ ID NO: 8500 - DNA, 20 bp, Artificial Sequence
  Description of Artificial Sequence: Synthetic oligonucleotide
  Target: APOC3; (+) strand; PAM type: NRG; PAM sequence: AAG
ttctcctgcctcagcctccc

SEQ ID NO: 8501 - DNA, 20 bp, Artificial Sequence
  Description of Artificial Sequence: Synthetic oligonucleotide
  Target: APOC3; (+) strand; PAM type: NRG; PAM sequence: TAG
tcctgcctcagcctcccaag

SEQ ID NO: 8502 - DNA, 20 bp, Artificial Sequence
  Description of Artificial Sequence: Synthetic oligonucleotide
  Target: APOC3; (+) strand; PAM type: NRG; PAM sequence: TGG
gcctcagcctcccaagtagc

SEQ ID NO: 8503 - DNA, 20 bp, Artificial Sequence
  Description of Artificial Sequence: Synthetic oligonucleotide
  Target: APOC3; (+) strand; PAM type: NRG; PAM sequence: GGG
cctcagcctcccaagtagct

SEQ ID NO: 8504 - DNA, 20 bp, Artificial Sequence
  Description of Artificial Sequence: Synthetic oligonucleotide
  Target: APOC3; (+) strand; PAM type: NRG; PAM sequence: TAG
ctcccaagtagctgggacca

SEQ ID NO: 8505 - DNA, 20 bp, Artificial Sequence
  Description of Artificial Sequence: Synthetic oligonucleotide
  Target: APOC3; (+) strand; PAM type: NRG; PAM sequence: AGG
tcccaagtagctgggaccat

SEQ ID NO: 8506 - DNA, 20 bp, Artificial Sequence
  Description of Artificial Sequence: Synthetic oligonucleotide
  Target: APOC3; (+) strand; PAM type: NRG; PAM sequence: CGG
taggcgcccgccaccacgcc

SEQ ID NO: 8507 - DNA, 20 bp, Artificial Sequence
  Description of Artificial Sequence: Synthetic oligonucleotide
  Target: APOC3; (+) strand; PAM type: NRG; PAM sequence: TAG
tttttttttttttgtatttt

SEQ ID NO: 8508 - DNA, 20 bp, Artificial Sequence
  Description of Artificial Sequence: Synthetic oligonucleotide
  Target: APOC3; (+) strand; PAM type: NRG; PAM sequence: TAG
ttttttttttgtatttttag

SEQ ID NO: 8509 - DNA, 20 bp, Artificial Sequence
  Description of Artificial Sequence: Synthetic oligonucleotide
  Target: APOC3; (+) strand; PAM type: NRG; PAM sequence: GAG
ttttttttgtatttttagta

SEQ ID NO: 8510 - DNA, 20 bp, Artificial Sequence
  Description of Artificial Sequence: Synthetic oligonucleotide
  Target: APOC3; (+) strand; PAM type: NRG; PAM sequence: TGG
ttttgtatttttagtagaga

SEQ ID NO: 8511 - DNA, 20 bp, Artificial Sequence
  Description of Artificial Sequence: Synthetic oligonucleotide
  Target: APOC3; (+) strand; PAM type: NRG; PAM sequence: GGG
tttgtatttttagtagagat

SEQ ID NO: 8512 - DNA, 20 bp, Artificial Sequence
  Description of Artificial Sequence: Synthetic oligonucleotide
  Target: APOC3; (+) strand; PAM type: NRG; PAM sequence: GGG
ttgtatttttagtagagatg

SEQ ID NO: 8513 - DNA, 20 bp, Artificial Sequence
  Description of Artificial Sequence: Synthetic oligonucleotide
  Target: APOC3; (+) strand; PAM type: NRG; PAM sequence: TAG
gagatggggtttcgccgtgt

SEQ ID NO: 8514 - DNA, 20 bp, Artificial Sequence
  Description of Artificial Sequence: Synthetic oligonucleotide
  Target: APOC3; (+) strand; PAM type: NRG; PAM sequence: CAG
tggggtttcgccgtgttagc

SEQ ID NO: 8515 - DNA, 20 bp, Artificial Sequence
  Description of Artificial Sequence: Synthetic oligonucleotide
  Target: APOC3; (+) strand; PAM type: NRG; PAM sequence: AGG
ggggtttcgccgtgttagcc

SEQ ID NO: 8516 - DNA, 20 bp, Artificial Sequence
  Description of Artificial Sequence: Synthetic oligonucleotide
  Target: APOC3; (+) strand; PAM type: NRG; PAM sequence: TGG
tttcgccgtgttagccagga

SEQ ID NO: 8517 - DNA, 20 bp, Artificial Sequence
  Description of Artificial Sequence: Synthetic oligonucleotide
  Target: APOC3; (+) strand; PAM type: NRG; PAM sequence: AAG
ccgcccgcctcaacctccca

SEQ ID NO: 8518 - DNA, 20 bp, Artificial Sequence
  Description of Artificial Sequence: Synthetic oligonucleotide
  Target: APOC3; (+) strand; PAM type: NRG; PAM sequence: GAG
cctcaacctcccaaagtgct

SEQ ID NO: 8519 - DNA, 20 bp, Artificial Sequence
  Description of Artificial Sequence: Synthetic oligonucleotide
  Target: APOC3; (+) strand; PAM type: NRG; PAM sequence: CAG
ctcccaaagtgctgagatta

SEQ ID NO: 8520 - DNA, 20 bp, Artificial Sequence
  Description of Artificial Sequence: Synthetic oligonucleotide
  Target: APOC3; (+) strand; PAM type: NRG; PAM sequence: AGG
tcccaaagtgctgagattac

SEQ ID NO: 8521 - DNA, 20 bp, Artificial Sequence
  Description of Artificial Sequence: Synthetic oligonucleotide
  Target: APOC3; (+) strand; PAM type: NRG; PAM sequence: GAG
agtgctgagattacaggcgt

SEQ ID NO: 8522 - DNA, 20 bp, Artificial Sequence
  Description of Artificial Sequence: Synthetic oligonucleotide
  Target: APOC3; (+) strand; PAM type: NRG; PAM sequence: CGG
caggcgtgagccaccacgcc

SEQ ID NO: 8523 - DNA, 20 bp, Artificial Sequence
  Description of Artificial Sequence: Synthetic oligonucleotide
  Target: APOC3; (+) strand; PAM type: NRG; PAM sequence: AAG
taaaaaattattttcaatcc

SEQ ID NO: 8524 - DNA, 20 bp, Artificial Sequence
  Description of Artificial Sequence: Synthetic oligonucleotide
  Target: APOC3; (+) strand; PAM type: NRG; PAM sequence: AGG
aaaaaattattttcaatcca

SEQ ID NO: 8525 - DNA, 20 bp, Artificial Sequence
  Description of Artificial Sequence: Synthetic oligonucleotide
  Target: APOC3; (+) strand; PAM type: NRG; PAM sequence: TGG
aattattttcaatccaaggt

SEQ ID NO: 8526 - DNA, 20 bp, Artificial Sequence
  Description of Artificial Sequence: Synthetic oligonucleotide
  Target: APOC3; (+) strand; PAM type: NRG; PAM sequence: TGG
tccaaggttggttgaatcca

SEQ ID NO: 8527 - DNA, 20 bp, Artificial Sequence
  Description of Artificial Sequence: Synthetic oligonucleotide
  Target: APOC3; (+) strand; PAM type: NRG; PAM sequence: CAG
gttggttgaatccatggaca

SEQ ID NO: 8528 - DNA, 20 bp, Artificial Sequence
  Description of Artificial Sequence: Synthetic oligonucleotide
  Target: APOC3; (+) strand; PAM type: NRG; PAM sequence: AAG
aatccatggacacagaaacc

SEQ ID NO: 8529 - DNA, 20 bp, Artificial Sequence
  Description of Artificial Sequence: Synthetic oligonucleotide
  Target: APOC3; (+) strand; PAM type: NRG; PAM sequence: AGG
atccatggacacagaaacca

SEQ ID NO: 8530 - DNA, 20 bp, Artificial Sequence
  Description of Artificial Sequence: Synthetic oligonucleotide
  Target: APOC3; (+) strand; PAM type: NRG; PAM sequence: CAG
ggacacagaaaccaaggata

SEQ ID NO: 8531 - DNA, 20 bp, Artificial Sequence
  Description of Artificial Sequence: Synthetic oligonucleotide
  Target: APOC3; (+) strand; PAM type: NRG; PAM sequence: GAG
acacagaaaccaaggataca

SEQ ID NO: 8532 - DNA, 20 bp, Artificial Sequence
  Description of Artificial Sequence: Synthetic oligonucleotide
  Target: APOC3; (+) strand; PAM type: NRG; PAM sequence: AGG
cacagaaaccaaggatacag

SEQ ID NO: 8533 - DNA, 20 bp, Artificial Sequence
  Description of Artificial Sequence: Synthetic oligonucleotide
  Target: APOC3; (+) strand; PAM type: NRG; PAM sequence: GGG
acagaaaccaaggatacaga

SEQ ID NO: 8534 - DNA, 20 bp, Artificial Sequence
  Description of Artificial Sequence: Synthetic oligonucleotide
  Target: APOC3; (+) strand; PAM type: NRG; PAM sequence: TAG
aggatacagagggctgccta

SEQ ID NO: 8535 - DNA, 20 bp, Artificial Sequence
  Description of Artificial Sequence: Synthetic oligonucleotide
  Target: APOC3; (+) strand; PAM type: NRG; PAM sequence: GAG
gatacagagggctgcctata

SEQ ID NO: 8536 - DNA, 20 bp, Artificial Sequence
  Description of Artificial Sequence: Synthetic oligonucleotide
  Target: APOC3; (+) strand; PAM type: NRG; PAM sequence: TGG
agggctgcctatagagctcc

SEQ ID NO: 8537 - DNA, 20 bp, Artificial Sequence
  Description of Artificial Sequence: Synthetic oligonucleotide
  Target: APOC3; (+) strand; PAM type: NRG; PAM sequence: CAG
tgcctatagagctcctggca

SEQ ID NO: 8538 - DNA, 20 bp, Artificial Sequence
  Description of Artificial Sequence: Synthetic oligonucleotide
  Target: APOC3; (+) strand; PAM type: NRG; PAM sequence: GAG
cctatagagctcctggcaca

SEQ ID NO: 8539 - DNA, 20 bp, Artificial Sequence
  Description of Artificial Sequence: Synthetic oligonucleotide
  Target: APOC3; (+) strand; PAM type: NRG; PAM sequence: AAG
tagagctcctggcacagagt

SEQ ID NO: 8540 - DNA, 20 bp, Artificial Sequence
  Description of Artificial Sequence: Synthetic oligonucleotide
  Target: APOC3; (+) strand; PAM type: NRG; PAM sequence: TAG
acagagtaagctctgaaaaa

SEQ ID NO: 8541 - DNA, 20 bp, Artificial Sequence
  Description of Artificial Sequence: Synthetic oligonucleotide
  Target: APOC3; (+) strand; PAM type: NRG; PAM sequence: TGG
atcatactgtgttcctgatt

SEQ ID NO: 8542 - DNA, 20 bp, Artificial Sequence
  Description of Artificial Sequence: Synthetic oligonucleotide
  Target: APOC3; (+) strand; PAM type: NRG; PAM sequence: GAG
catactgtgttcctgatttg

SEQ ID NO: 8543 - DNA, 20 bp, Artificial Sequence
  Description of Artificial Sequence: Synthetic oligonucleotide
  Target: APOC3; (+) strand; PAM type: NRG; PAM sequence: AAG
tgtgttcctgatttggagca

SEQ ID NO: 8544 - DNA, 20 bp, Artificial Sequence
  Description of Artificial Sequence: Synthetic oligonucleotide
  Target: APOC3; (+) strand; PAM type: NRG; PAM sequence: CAG
gttcctgatttggagcaaag

SEQ ID NO: 8545 - DNA, 20 bp, Artificial Sequence
  Description of Artificial Sequence: Synthetic oligonucleotide
  Target: APOC3; (+) strand; PAM type: NRG; PAM sequence: AGG
ttcctgatttggagcaaagc

SEQ ID NO: 8546 - DNA, 20 bp, Artificial Sequence
  Description of Artificial Sequence: Synthetic oligonucleotide
  Target: APOC3; (+) strand; PAM type: NRG; PAM sequence: GGG
tcctgatttggagcaaagca

SEQ ID NO: 8547 - DNA, 20 bp, Artificial Sequence
  Description of Artificial Sequence: Synthetic oligonucleotide
  Target: APOC3; (+) strand; PAM type: NRG; PAM sequence: GAG
ctgatttggagcaaagcagg

SEQ ID NO: 8548 - DNA, 20 bp, Artificial Sequence
  Description of Artificial Sequence: Synthetic oligonucleotide
  Target: APOC3; (+) strand; PAM type: NRG; PAM sequence: AGG
tgatttggagcaaagcaggg

SEQ ID NO: 8549 - DNA, 20 bp, Artificial Sequence
  Description of Artificial Sequence: Synthetic oligonucleotide
  Target: APOC3; (+) strand; PAM type: NRG; PAM sequence: GGG
gatttggagcaaagcaggga

SEQ ID NO: 8550 - DNA, 20 bp, Artificial Sequence
  Description of Artificial Sequence: Synthetic oligonucleotide
  Target: APOC3; (+) strand; PAM type: NRG; PAM sequence: TAG
ttggagcaaagcagggaggg

SEQ ID NO: 8551 - DNA, 20 bp, Artificial Sequence
  Description of Artificial Sequence: Synthetic oligonucleotide
  Target: APOC3; (+) strand; PAM type: NRG; PAM sequence: CAG
gagcaaagcagggagggtag

SEQ ID NO: 8552 - DNA, 20 bp, Artificial Sequence
  Description of Artificial Sequence: Synthetic oligonucleotide
  Target: APOC3; (+) strand; PAM type: NRG; PAM sequence: GAG
gcaaagcagggagggtagca

SEQ ID NO: 8553 - DNA, 20 bp, Artificial Sequence
  Description of Artificial Sequence: Synthetic oligonucleotide
  Target: APOC3; (+) strand; PAM type: NRG; PAM sequence: TAG
tagcagagtgctccctcctc

SEQ ID NO: 8554 - DNA, 20 bp, Artificial Sequence
  Description of Artificial Sequence: Synthetic oligonucleotide
  Target: APOC3; (+) strand; PAM type: NRG; PAM sequence: GAG
agagtgctccctcctctagt

SEQ ID NO: 8555 - DNA, 20 bp, Artificial Sequence
  Description of Artificial Sequence: Synthetic oligonucleotide
  Target: APOC3; (+) strand; PAM type: NRG; PAM sequence: GAG
agtgctccctcctctagtga

SEQ ID NO: 8556 - DNA, 20 bp, Artificial Sequence
  Description of Artificial Sequence: Synthetic oligonucleotide
  Target: APOC3; (+) strand; PAM type: NRG; PAM sequence: TGG
gctccctcctctagtgagag

SEQ ID NO: 8557 - DNA, 20 bp, Artificial Sequence
  Description of Artificial Sequence: Synthetic oligonucleotide
  Target: APOC3; (+) strand; PAM type: NRG; PAM sequence: CAG
ccctcctctagtgagagtgg

SEQ ID NO: 8558 - DNA, 20 bp, Artificial Sequence
  Description of Artificial Sequence: Synthetic oligonucleotide
  Target: APOC3; (+) strand; PAM type: NRG; PAM sequence: GAG
ctcctctagtgagagtggca

SEQ ID NO: 8559 - DNA, 20 bp, Artificial Sequence
  Description of Artificial Sequence: Synthetic oligonucleotide
  Target: APOC3; (+) strand; PAM type: NRG; PAM sequence: GAG
tctagtgagagtggcagagt

SEQ ID NO: 8560 - DNA, 20 bp, Artificial Sequence
  Description of Artificial Sequence: Synthetic oligonucleotide
  Target: APOC3; (+) strand; PAM type: NRG; PAM sequence: CAG
gagagtggcagagtgagact

SEQ ID NO: 8561 - DNA, 20 bp, Artificial Sequence
  Description of Artificial Sequence: Synthetic oligonucleotide
  Target: APOC3; (+) strand; PAM type: NRG; PAM sequence: GAG
agagtgagactcagccctct

SEQ ID NO: 8562 - DNA, 20 bp, Artificial Sequence
  Description of Artificial Sequence: Synthetic oligonucleotide
  Target: APOC3; (+) strand; PAM type: NRG; PAM sequence: AGG
gagtgagactcagccctctg

SEQ ID NO: 8563 - DNA, 20 bp, Artificial Sequence
  Description of Artificial Sequence: Synthetic oligonucleotide
  Target: APOC3; (+) strand; PAM type: NRG; PAM sequence: GGG
agtgagactcagccctctga

SEQ ID NO: 8564 - DNA, 20 bp, Artificial Sequence
  Description of Artificial Sequence: Synthetic oligonucleotide
  Target: APOC3; (+) strand; PAM type: NRG; PAM sequence: GGG
gtgagactcagccctctgag

SEQ ID NO: 8565 - DNA, 20 bp, Artificial Sequence
  Description of Artificial Sequence: Synthetic oligonucleotide
  Target: APOC3; (+) strand; PAM type: NRG; PAM sequence: CAG
ctcagccctctgaggggcgc

SEQ ID NO: 8566 - DNA, 20 bp, Artificial Sequence
  Description of Artificial Sequence: Synthetic oligonucleotide
  Target: APOC3; (+) strand; PAM type: NRG; PAM sequence: AGG
tcagccctctgaggggcgcc

SEQ ID NO: 8567 - DNA, 20 bp, Artificial Sequence
  Description of Artificial Sequence: Synthetic oligonucleotide
  Target: APOC3; (+) strand; PAM type: NRG; PAM sequence: TGG
gccctctgaggggcgccagg

SEQ ID NO: 8568 - DNA, 20 bp, Artificial Sequence
  Description of Artificial Sequence: Synthetic oligonucleotide
  Target: APOC3; (+) strand; PAM type: NRG; PAM sequence: GGG
ccctctgaggggcgccaggt

SEQ ID NO: 8569 - DNA, 20 bp, Artificial Sequence
  Description of Artificial Sequence: Synthetic oligonucleotide
  Target: APOC3; (+) strand; PAM type: NRG; PAM sequence: CAG
ctgaggggcgccaggtgggc

SEQ ID NO: 8570 - DNA, 20 bp, Artificial Sequence
  Description of Artificial Sequence: Synthetic oligonucleotide
  Target: APOC3; (+) strand; PAM type: NRG; PAM sequence: GAG
gaggggcgccaggtgggcca

SEQ ID NO: 8571 - DNA, 20 bp, Artificial Sequence
  Description of Artificial Sequence: Synthetic oligonucleotide
  Target: APOC3; (+) strand; PAM type: NRG; PAM sequence: AGG
aggggcgccaggtgggccag

SEQ ID NO: 8572 - DNA, 20 bp, Artificial Sequence
  Description of Artificial Sequence: Synthetic oligonucleotide
  Target: APOC3; (+) strand; PAM type: NRG; PAM sequence: CAG
ggcgccaggtgggccagagg

SEQ ID NO: 8573 - DNA, 20 bp, Artificial Sequence
  Description of Artificial Sequence: Synthetic oligonucleotide
  Target: APOC3; (+) strand; PAM type: NRG; PAM sequence: AGG
gcgccaggtgggccagaggc

SEQ ID NO: 8574 - DNA, 20 bp, Artificial Sequence
  Description of Artificial Sequence: Synthetic oligonucleotide
  Target: APOC3; (+) strand; PAM type: NRG; PAM sequence: GGG
cgccaggtgggccagaggca

SEQ ID NO: 8575 - DNA, 20 bp, Artificial Sequence
  Description of Artificial Sequence: Synthetic oligonucleotide
  Target: APOC3; (+) strand; PAM type: NRG; PAM sequence: TGG
gtgggccagaggcagggtga

SEQ ID NO: 8576 - DNA, 20 bp, Artificial Sequence
  Description of Artificial Sequence: Synthetic oligonucleotide
  Target: APOC3; (+) strand; PAM type: NRG; PAM sequence: GGG
tgggccagaggcagggtgat

SEQ ID NO: 8577 - DNA, 20 bp, Artificial Sequence
  Description of Artificial Sequence: Synthetic oligonucleotide
  Target: APOC3; (+) strand; PAM type: NRG; PAM sequence: TGG
gccagaggcagggtgatggg

SEQ ID NO: 8578 - DNA, 20 bp, Artificial Sequence
  Description of Artificial Sequence: Synthetic oligonucleotide
  Target: APOC3; (+) strand; PAM type: NRG; PAM sequence: GGG
ccagaggcagggtgatgggt

SEQ ID NO: 8579 - DNA, 20 bp, Artificial Sequence
  Description of Artificial Sequence: Synthetic oligonucleotide
  Target: APOC3; (+) strand; PAM type: NRG; PAM sequence: CAG
ggcagggtgatgggtgggac

SEQ ID NO: 8580 - DNA, 20 bp, Artificial Sequence
  Description of Artificial Sequence: Synthetic oligonucleotide
  Target: APOC3; (+) strand; PAM type: NRG; PAM sequence: GAG
gtgatgggtgggaccagcct

SEQ ID NO: 8581 - DNA, 20 bp, Artificial Sequence
  Description of Artificial Sequence: Synthetic oligonucleotide
  Target: APOC3; (+) strand; PAM type: NRG; PAM sequence: AGG
tgatgggtgggaccagcctg

SEQ ID NO: 8582 - DNA, 20 bp, Artificial Sequence
  Description of Artificial Sequence: Synthetic oligonucleotide
  Target: APOC3; (+) strand; PAM type: NRG; PAM sequence: CAG
ctcctgcccttcttgccccc

SEQ ID NO: 8583 - DNA, 20 bp, Artificial Sequence
  Description of Artificial Sequence: Synthetic oligonucleotide
  Target: APOC3; (+) strand; PAM type: NRG; PAM sequence: TGG
tgccccccagccacactccc

SEQ ID NO: 8584 - DNA, 20 bp, Artificial Sequence
  Description of Artificial Sequence: Synthetic oligonucleotide
  Target: APOC3; (+) strand; PAM type: NRG; PAM sequence: GGG
gccccccagccacactccct

SEQ ID NO: 8585 - DNA, 20 bp, Artificial Sequence
  Description of Artificial Sequence: Synthetic oligonucleotide
  Target: APOC3; (+) strand; PAM type: NRG; PAM sequence: CAG
ccccagccacactccctggg

SEQ ID NO: 8586 - DNA, 20 bp, Artificial Sequence
  Description of Artificial Sequence: Synthetic oligonucleotide
  Target: APOC3; (+) strand; PAM type: NRG; PAM sequence: AGG
cccagccacactccctgggc

SEQ ID NO: 8587 - DNA, 20 bp, Artificial Sequence
  Description of Artificial Sequence: Synthetic oligonucleotide
  Target: APOC3; (+) strand; PAM type: NRG; PAM sequence: GAG
cagccacactccctgggcag

SEQ ID NO: 8588 - DNA, 20 bp, Artificial Sequence
  Description of Artificial Sequence: Synthetic oligonucleotide
  Target: APOC3; (+) strand; PAM type: NRG; PAM sequence: CAG
ccacactccctgggcaggag

SEQ ID NO: 8589 - DNA, 20 bp, Artificial Sequence
  Description of Artificial Sequence: Synthetic oligonucleotide
  Target: APOC3; (+) strand; PAM type: NRG; PAM sequence: TGG
actccctgggcaggagcagc

SEQ ID NO: 8590 - DNA, 20 bp, Artificial Sequence
  Description of Artificial Sequence: Synthetic oligonucleotide
  Target: APOC3; (+) strand; PAM type: NRG; PAM sequence: GAG
tgggcaggagcagctggctt

SEQ ID NO: 8591 - DNA, 20 bp, Artificial Sequence
  Description of Artificial Sequence: Synthetic oligonucleotide
  Target: APOC3; (+) strand; PAM type: NRG; PAM sequence: CAG
gcaggagcagctggcttgag

SEQ ID NO: 8592 - DNA, 20 bp, Artificial Sequence
  Description of Artificial Sequence: Synthetic oligonucleotide
  Target: APOC3; (+) strand; PAM type: NRG; PAM sequence: TGG
agctggcttgagcagaatct

SEQ ID NO: 8593 - DNA, 20 bp, Artificial Sequence
  Description of Artificial Sequence: Synthetic oligonucleotide
  Target: APOC3; (+) strand; PAM type: NRG; PAM sequence: GGG
gctggcttgagcagaatctt

SEQ ID NO: 8594 - DNA, 20 bp, Artificial Sequence
  Description of Artificial Sequence: Synthetic oligonucleotide
  Target: APOC3; (+) strand; PAM type: NRG; PAM sequence: GAG
tgagcagaatcttgggacct

SEQ ID NO: 8595 - DNA, 20 bp, Artificial Sequence
  Description of Artificial Sequence: Synthetic oligonucleotide
  Target: APOC3; (+) strand; PAM type: NRG; PAM sequence: AGG
gagcagaatcttgggacctg

SEQ ID NO: 8596 - DNA, 20 bp, Artificial Sequence
  Description of Artificial Sequence: Synthetic oligonucleotide
  Target: APOC3; (+) strand; PAM type: NRG; PAM sequence: CAG
atcttgggacctgaggctct

SEQ ID NO: 8597 - DNA, 20 bp, Artificial Sequence
  Description of Artificial Sequence: Synthetic oligonucleotide
  Target: APOC3; (+) strand; PAM type: NRG; PAM sequence: AGG
tcttgggacctgaggctctc

SEQ ID NO: 8598 - DNA, 20 bp, Artificial Sequence
  Description of Artificial Sequence: Synthetic oligonucleotide
  Target: APOC3; (+) strand; PAM type: NRG; PAM sequence: GGG
cttgggacctgaggctctca

SEQ ID NO: 8599 - DNA, 20 bp, Artificial Sequence
  Description of Artificial Sequence: Synthetic oligonucleotide
  Target: APOC3; (+) strand; PAM type: NRG; PAM sequence: GGG
ttgggacctgaggctctcag

SEQ ID NO: 8600 - DNA, 20 bp, Artificial Sequence
  Description of Artificial Sequence: Synthetic oligonucleotide
  Target: APOC3; (+) strand; PAM type: NRG; PAM sequence: TGG
gctctcaggggacctcccat

SEQ ID NO: 8601 - DNA, 20 bp, Artificial Sequence
  Description of Artificial Sequence: Synthetic oligonucleotide
  Target: APOC3; (+) strand; PAM type: NRG; PAM sequence: GGG
ctctcaggggacctcccatt

SEQ ID NO: 8602 - DNA, 20 bp, Artificial Sequence
  Description of Artificial Sequence: Synthetic oligonucleotide
  Target: APOC3; (+) strand; PAM type: NRG; PAM sequence: GGG
tctcaggggacctcccattg

SEQ ID NO: 8603 - DNA, 20 bp, Artificial Sequence
  Description of Artificial Sequence: Synthetic oligonucleotide
  Target: APOC3; (+) strand; PAM type: NRG; PAM sequence: GGG
ctcaggggacctcccattgg

SEQ ID NO: 8604 - DNA, 20 bp, Artificial Sequence
  Description of Artificial Sequence: Synthetic oligonucleotide
  Target: APOC3; (+) strand; PAM type: NRG; PAM sequence: TGG
ggggacctcccattggggga

SEQ ID NO: 8605 - DNA, 20 bp, Artificial Sequence
  Description of Artificial Sequence: Synthetic oligonucleotide
  Target: APOC3; (+) strand; PAM type: NRG; PAM sequence: GAG
ggacctcccattgggggatg

SEQ ID NO: 8606 - DNA, 20 bp, Artificial Sequence
  Description of Artificial Sequence: Synthetic oligonucleotide
  Target: APOC3; (+) strand; PAM type: NRG; PAM sequence: AGG
gacctcccattgggggatgg

SEQ ID NO: 8607 - DNA, 20 bp, Artificial Sequence
  Description of Artificial Sequence: Synthetic oligonucleotide
  Target: APOC3; (+) strand; PAM type: NRG; PAM sequence: GGG
acctcccattgggggatgga

SEQ ID NO: 8608 - DNA, 20 bp, Artificial Sequence
  Description of Artificial Sequence: Synthetic oligonucleotide
  Target: APOC3; (+) strand; PAM type: NRG; PAM sequence: TGG
cattgggggatggagggcaa

SEQ ID NO: 8609 - DNA, 20 bp, Artificial Sequence
  Description of Artificial Sequence: Synthetic oligonucleotide
  Target: APOC3; (+) strand; PAM type: NRG; PAM sequence: TGG
tgggggatggagggcaatgg

SEQ ID NO: 8610 - DNA, 20 bp, Artificial Sequence
  Description of Artificial Sequence: Synthetic oligonucleotide
  Target: APOC3; (+) strand; PAM type: NRG; PAM sequence: TGG
gggatggagggcaatggtgg

SEQ ID NO: 8611 - DNA, 20 bp, Artificial Sequence
  Description of Artificial Sequence: Synthetic oligonucleotide
  Target: APOC3; (+) strand; PAM type: NRG; PAM sequence: CAG
agggcaatggtggtggtgcc

SEQ ID NO: 8612 - DNA, 20 bp, Artificial Sequence
  Description of Artificial Sequence: Synthetic oligonucleotide
  Target: APOC3; (+) strand; PAM type: NRG; PAM sequence: AGG
gggcaatggtggtggtgccc

SEQ ID NO: 8613 - DNA, 20 bp, Artificial Sequence
  Description of Artificial Sequence: Synthetic oligonucleotide
  Target: APOC3; (+) strand; PAM type: NRG; PAM sequence: GAG
gcaatggtggtggtgcccag

SEQ ID NO: 8614 - DNA, 20 bp, Artificial Sequence
  Description of Artificial Sequence: Synthetic oligonucleotide
  Target: APOC3; (+) strand; PAM type: NRG; PAM sequence: AGG
caatggtggtggtgcccagg

SEQ ID NO: 8615 - DNA, 20 bp, Artificial Sequence
  Description of Artificial Sequence: Synthetic oligonucleotide
  Target: APOC3; (+) strand; PAM type: NRG; PAM sequence: TAG
tgcccaggaggtcttctact

SEQ ID NO: 8616 - DNA, 20 bp, Artificial Sequence
  Description of Artificial Sequence: Synthetic oligonucleotide
  Target: APOC3; (+) strand; PAM type: NRG; PAM sequence: TGG
tcttctacttagatgtctat

SEQ ID NO: 8617 - DNA, 20 bp, Artificial Sequence
  Description of Artificial Sequence: Synthetic oligonucleotide
  Target: APOC3; (+) strand; PAM type: NRG; PAM sequence: GAG
tgtctattggatctctaaat

SEQ ID NO: 8618 - DNA, 20 bp, Artificial Sequence
  Description of Artificial Sequence: Synthetic oligonucleotide
  Target: APOC3; (+) strand; PAM type: NRG; PAM sequence: AGG
gtctattggatctctaaatg

SEQ ID NO: 8619 - DNA, 20 bp, Artificial Sequence
  Description of Artificial Sequence: Synthetic oligonucleotide
  Target: APOC3; (+) strand; PAM type: NRG; PAM sequence: GAG
atcacacacaaacatccact

SEQ ID NO: 8620 - DNA, 20 bp, Artificial Sequence
  Description of Artificial Sequence: Synthetic oligonucleotide
  Target: APOC3; (+) strand; PAM type: NRG; PAM sequence: AAG
acacacaaacatccactgag

SEQ ID NO: 8621 - DNA, 20 bp, Artificial Sequence
  Description of Artificial Sequence: Synthetic oligonucleotide
  Target: APOC3; (+) strand; PAM type: NRG; PAM sequence: AGG
cacacaaacatccactgaga

SEQ ID NO: 8622 - DNA, 20 bp, Artificial Sequence
  Description of Artificial Sequence: Synthetic oligonucleotide
  Target: APOC3; (+) strand; PAM type: NRG; PAM sequence: CAG
gagaaggtgacacaccacgt

SEQ ID NO: 8623 - DNA, 20 bp, Artificial Sequence
  Description of Artificial Sequence: Synthetic oligonucleotide
  Target: APOC3; (+) strand; PAM type: NRG; PAM sequence: TGG
ggtgacacaccacgtcagca

SEQ ID NO: 8624 - DNA, 20 bp, Artificial Sequence
  Description of Artificial Sequence: Synthetic oligonucleotide
  Target: APOC3; (+) strand; PAM type: NRG; PAM sequence: GGG
gtgacacaccacgtcagcat

SEQ ID NO: 8625 - DNA, 20 bp, Artificial Sequence
  Description of Artificial Sequence: Synthetic oligonucleotide
  Target: APOC3; (+) strand; PAM type: NRG; PAM sequence: CGG
gtcagcatgggtccctctgc

SEQ ID NO: 8626 - DNA, 20 bp, Artificial Sequence
  Description of Artificial Sequence: Synthetic oligonucleotide
  Target: APOC3; (+) strand; PAM type: NRG; PAM sequence: TAG
ctgccggaccacaccactcc

SEQ ID NO: 8627 - DNA, 20 bp, Artificial Sequence
  Description of Artificial Sequence: Synthetic oligonucleotide
  Target: APOC3; (+) strand; PAM type: NRG; PAM sequence: GAG
acaccactcctagtgactat

SEQ ID NO: 8628 - DNA, 20 bp, Artificial Sequence
  Description of Artificial Sequence: Synthetic oligonucleotide
  Target: APOC3; (+) strand; PAM type: NRG; PAM sequence: AGG
caccactcctagtgactatg

SEQ ID NO: 8629 - DNA, 20 bp, Artificial Sequence
  Description of Artificial Sequence: Synthetic oligonucleotide
  Target: APOC3; (+) strand; PAM type: NRG; PAM sequence: CAG
agtgactatgaggtgacatc

SEQ ID NO: 8630 - DNA, 20 bp, Artificial Sequence
  Description of Artificial Sequence: Synthetic oligonucleotide
  Target: APOC3; (+) strand; PAM type: NRG; PAM sequence: AGG
gtgactatgaggtgacatcc

SEQ ID NO: 8631 - DNA, 20 bp, Artificial Sequence
  Description of Artificial Sequence: Synthetic oligonucleotide
  Target: APOC3; (+) strand; PAM type: NRG; PAM sequence: TGG
atccaggcacgttgcactat

SEQ ID NO: 8632 - DNA, 20 bp, Artificial Sequence
  Description of Artificial Sequence: Synthetic oligonucleotide
  Target: APOC3; (+) strand; PAM type: NRG; PAM sequence: CGG
gttgcactattggctcctgt

SEQ ID NO: 8633 - DNA, 20 bp, Artificial Sequence
  Description of Artificial Sequence: Synthetic oligonucleotide
  Target: APOC3; (+) strand; PAM type: NRG; PAM sequence: GAG
cactattggctcctgtcggt

SEQ ID NO: 8634 - DNA, 20 bp, Artificial Sequence
  Description of Artificial Sequence: Synthetic oligonucleotide
  Target: APOC3; (+) strand; PAM type: NRG; PAM sequence: CAG
ttggctcctgtcggtgagtg

SEQ ID NO: 8635 - DNA, 20 bp, Artificial Sequence
  Description of Artificial Sequence: Synthetic oligonucleotide
  Target: APOC3; (+) strand; PAM type: NRG; PAM sequence: CAG
gtgagtgcagtgcctgacaa

SEQ ID NO: 8636 - DNA, 20 bp, Artificial Sequence
  Description of Artificial Sequence: Synthetic oligonucleotide
  Target: APOC3; (+) strand; PAM type: NRG; PAM sequence: GAG
gtgcagtgcctgacaacagt

SEQ ID NO: 8637 - DNA, 20 bp, Artificial Sequence
  Description of Artificial Sequence: Synthetic oligonucleotide
  Target: APOC3; (+) strand; PAM type: NRG; PAM sequence: CAG
tttgtaaaaatgaacgccat

SEQ ID NO: 8638 - DNA, 20 bp, Artificial Sequence
  Description of Artificial Sequence: Synthetic oligonucleotide
  Target: APOC3; (+) strand; PAM type: NRG; PAM sequence: GAG
tgtaaaaatgaacgccatca

SEQ ID NO: 8639 - DNA, 20 bp, Artificial Sequence
  Description of Artificial Sequence: Synthetic oligonucleotide
  Target: APOC3; (+) strand; PAM type: NRG; PAM sequence: TAG
aaaaatgaacgccatcagag

SEQ ID NO: 8640 - DNA, 20 bp, Artificial Sequence
  Description of Artificial Sequence: Synthetic oligonucleotide
  Target: APOC3; (+) strand; PAM type: NRG; PAM sequence: CAG
ttgctttgtgttcatttttt

SEQ ID NO: 8641 - DNA, 20 bp, Artificial Sequence
  Description of Artificial Sequence: Synthetic oligonucleotide
  Target: APOC3; (+) strand; PAM type: NRG; PAM sequence: CAG
gtgttcattttttcagtttc

SEQ ID NO: 8642 - DNA, 20 bp, Artificial Sequence
  Description of Artificial Sequence: Synthetic oligonucleotide
  Target: APOC3; (+) strand; PAM type: NRG; PAM sequence: AAG
ttcattttttcagtttccag

SEQ ID NO: 8643 - DNA, 20 bp, Artificial Sequence
  Description of Artificial Sequence: Synthetic oligonucleotide
  Target: APOC3; (+) strand; PAM type: NRG; PAM sequence: TGG
attttttcagtttccagaag

SEQ ID NO: 8644 - DNA, 20 bp, Artificial Sequence
  Description of Artificial Sequence: Synthetic oligonucleotide
  Target: APOC3; (+) strand; PAM type: NRG; PAM sequence: TAG
agaagtggcttaatgtttcc

SEQ ID NO: 8645 - DNA, 20 bp, Artificial Sequence
  Description of Artificial Sequence: Synthetic oligonucleotide
  Target: APOC3; (+) strand; PAM type: NRG; PAM sequence: AGG
gaagtggcttaatgtttcct

SEQ ID NO: 8646 - DNA, 20 bp, Artificial Sequence
  Description of Artificial Sequence: Synthetic oligonucleotide
  Target: APOC3; (+) strand; PAM type: NRG; PAM sequence: GGG
aagtggcttaatgtttccta

SEQ ID NO: 8647 - DNA, 20 bp, Artificial Sequence
  Description of Artificial Sequence: Synthetic oligonucleotide
  Target: APOC3; (+) strand; PAM type: NRG; PAM sequence: AAG
cttaatgtttcctagggtca

SEQ ID NO: 8648 - DNA, 20 bp, Artificial Sequence
  Description of Artificial Sequence: Synthetic oligonucleotide
  Target: APOC3; (+) strand; PAM type: NRG; PAM sequence: AGG
ttaatgtttcctagggtcaa

SEQ ID NO: 8649 - DNA, 20 bp, Artificial Sequence
  Description of Artificial Sequence: Synthetic oligonucleotide
  Target: APOC3; (+) strand; PAM type: NRG; PAM sequence: CAG
atgtttcctagggtcaaagg

SEQ ID NO: 8650 - DNA, 20 bp, Artificial Sequence
  Description of Artificial Sequence: Synthetic oligonucleotide
  Target: APOC3; (+) strand; PAM type: NRG; PAM sequence: TGG
gtcaaatgacctcctgactc

SEQ ID NO: 8651 - DNA, 20 bp, Artificial Sequence
  Description of Artificial Sequence: Synthetic oligonucleotide
  Target: APOC3; (+) strand; PAM type: NRG; PAM sequence: TGG
gactctggcaccccttctgc

SEQ ID NO: 8652 - DNA, 20 bp, Artificial Sequence
  Description of Artificial Sequence: Synthetic oligonucleotide
  Target: APOC3; (+) strand; PAM type: NRG; PAM sequence: GGG
actctggcaccccttctgct

SEQ ID NO: 8653 - DNA, 20 bp, Artificial Sequence
  Description of Artificial Sequence: Synthetic oligonucleotide
  Target: APOC3; (+) strand; PAM type: NRG; PAM sequence: TAG
gctgggtccccactgccctg

SEQ ID NO: 8654 - DNA, 20 bp, Artificial Sequence
  Description of Artificial Sequence: Synthetic oligonucleotide
  Target: APOC3; (+) strand; PAM type: NRG; PAM sequence: TGG
gggtccccactgccctgtag

SEQ ID NO: 8655 - DNA, 20 bp, Artificial Sequence
  Description of Artificial Sequence: Synthetic oligonucleotide
  Target: APOC3; (+) strand; PAM type: NRG; PAM sequence: CAG
atgctgcctcctttttgatg

SEQ ID NO: 8656 - DNA, 20 bp, Artificial Sequence
  Description of Artificial Sequence: Synthetic oligonucleotide
  Target: APOC3; (+) strand; PAM type: NRG; PAM sequence: TGG
tgccatctctccgtgattgt

SEQ ID NO: 8657 - DNA, 20 bp, Artificial Sequence
  Description of Artificial Sequence: Synthetic oligonucleotide
  Target: APOC3; (+) strand; PAM type: NRG; PAM sequence: GGG
gccatctctccgtgattgtt

SEQ ID NO: 8658 - DNA, 20 bp, Artificial Sequence
  Description of Artificial Sequence: Synthetic oligonucleotide
  Target: APOC3; (+) strand; PAM type: NRG; PAM sequence: GGG
ccatctctccgtgattgttg

SEQ ID NO: 8659 - DNA, 20 bp, Artificial Sequence
  Description of Artificial Sequence: Synthetic oligonucleotide
  Target: APOC3; (+) strand; PAM type: NRG; PAM sequence: CAG
ctctccgtgattgttggggt

SEQ ID NO: 8660 - DNA, 20 bp, Artificial Sequence
  Description of Artificial Sequence: Synthetic oligonucleotide
  Target: APOC3; (+) strand; PAM type: NRG; PAM sequence: TGG
tgattgttggggtcagatgc

SEQ ID NO: 8661 - DNA, 20 bp, Artificial Sequence
  Description of Artificial Sequence: Synthetic oligonucleotide
  Target: APOC3; (+) strand; PAM type: NRG; PAM sequence: GAG
attgttggggtcagatgctg

SEQ ID NO: 8662 - DNA, 20 bp, Artificial Sequence
  Description of Artificial Sequence: Synthetic oligonucleotide
  Target: APOC3; (+) strand; PAM type: NRG; PAM sequence: TGG
agatgctggagtccactccc

SEQ ID NO: 8663 - DNA, 20 bp, Artificial Sequence
  Description of Artificial Sequence: Synthetic oligonucleotide
  Target: APOC3; (+) strand; PAM type: NRG; PAM sequence: TGG
ctggagtccactccctggct

SEQ ID NO: 8664 - DNA, 20 bp, Artificial Sequence
  Description of Artificial Sequence: Synthetic oligonucleotide
  Target: APOC3; (+) strand; PAM type: NRG; PAM sequence: CAG
ccactccctggcttggcatc

SEQ ID NO: 8665 - DNA, 20 bp, Artificial Sequence
  Description of Artificial Sequence: Synthetic oligonucleotide
  Target: APOC3; (+) strand; PAM type: NRG; PAM sequence: AGG
cactccctggcttggcatcc

SEQ ID NO: 8666 - DNA, 20 bp, Artificial Sequence
  Description of Artificial Sequence: Synthetic oligonucleotide
  Target: APOC3; (+) strand; PAM type: NRG; PAM sequence: TGG
acgtactgcctgtgtgtcct

SEQ ID NO: 8667 - DNA, 20 bp, Artificial Sequence
  Description of Artificial Sequence: Synthetic oligonucleotide
  Target: APOC3; (+) strand; PAM type: NRG; PAM sequence: GGG
cgtactgcctgtgtgtcctt

SEQ ID NO: 8668 - DNA, 20 bp, Artificial Sequence
  Description of Artificial Sequence: Synthetic oligonucleotide
  Target: APOC3; (+) strand; PAM type: NRG; PAM sequence: AAG
ctgcctgtgtgtccttgggc

SEQ ID NO: 8669 - DNA, 20 bp, Artificial Sequence
  Description of Artificial Sequence: Synthetic oligonucleotide
  Target: APOC3; (+) strand; PAM type: NRG; PAM sequence: GAG
gcaagtctcataacctctct

SEQ ID NO: 8670 - DNA, 20 bp, Artificial Sequence
  Description of Artificial Sequence: Synthetic oligonucleotide
  Target: APOC3; (+) strand; PAM type: NRG; PAM sequence: CAG
ctcataacctctctgagcct

SEQ ID NO: 8671 - DNA, 20 bp, Artificial Sequence
  Description of Artificial Sequence: Synthetic oligonucleotide
  Target: APOC3; (+) strand; PAM type: NRG; PAM sequence: TGG
tctctgagcctcagttacct

SEQ ID NO: 8672 - DNA, 20 bp, Artificial Sequence
  Description of Artificial Sequence: Synthetic oligonucleotide
  Target: APOC3; (+) strand; PAM type: NRG; PAM sequence: GAG
tgagcctcagttaccttggt

SEQ ID NO: 8673 - DNA, 20 bp, Artificial Sequence
  Description of Artificial Sequence: Synthetic oligonucleotide
  Target: APOC3; (+) strand; PAM type: NRG; PAM sequence: TAG
taaccattgtacctgcctcc

SEQ ID NO: 8674 - DNA, 20 bp, Artificial Sequence
  Description of Artificial Sequence: Synthetic oligonucleotide
  Target: APOC3; (+) strand; PAM type: NRG; PAM sequence: AGG
aaccattgtacctgcctcct

SEQ ID NO: 8675 - DNA, 20 bp, Artificial Sequence
  Description of Artificial Sequence: Synthetic oligonucleotide
  Target: APOC3; (+) strand; PAM type: NRG; PAM sequence: GAG
gtacctgcctcctaggctgt

SEQ ID NO: 8676 - DNA, 20 bp, Artificial Sequence
  Description of Artificial Sequence: Synthetic oligonucleotide
  Target: APOC3; (+) strand; PAM type: NRG; PAM sequence: AGG
tacctgcctcctaggctgtg

SEQ ID NO: 8677 - DNA, 20 bp, Artificial Sequence
  Description of Artificial Sequence: Synthetic oligonucleotide
  Target: APOC3; (+) strand; PAM type: NRG; PAM sequence: GAG
ctaggctgtgaggattcact

SEQ ID NO: 8678 - DNA, 20 bp, Artificial Sequence
  Description of Artificial Sequence: Synthetic oligonucleotide
  Target: APOC3; (+) strand; PAM type: NRG; PAM sequence: TAG
gattcactgagatgatctta

SEQ ID NO: 8679 - DNA, 20 bp, Artificial Sequence
  Description of Artificial Sequence: Synthetic oligonucleotide
  Target: APOC3; (+) strand; PAM type: NRG; PAM sequence: TGG
atagtgcttgcaacaatgtc

SEQ ID NO: 8680 - DNA, 20 bp, Artificial Sequence
  Description of Artificial Sequence: Synthetic oligonucleotide
  Target: APOC3; (+) strand; PAM type: NRG; PAM sequence: TAG
ttgcaacaatgtctggcaca

SEQ ID NO: 8681 - DNA, 20 bp, Artificial Sequence
  Description of Artificial Sequence: Synthetic oligonucleotide
  Target: APOC3; (+) strand; PAM type: NRG; PAM sequence: AGG
tgcaacaatgtctggcacat

SEQ ID NO: 8682 - DNA, 20 bp, Artificial Sequence
  Description of Artificial Sequence: Synthetic oligonucleotide
  Target: APOC3; (+) strand; PAM type: NRG; PAM sequence: AAG
caatgtctggcacataggaa

SEQ ID NO: 8683 - DNA, 20 bp, Artificial Sequence
  Description of Artificial Sequence: Synthetic oligonucleotide
  Target: APOC3; (+) strand; PAM type: NRG; PAM sequence: TAG
gaaaagtgatcactaaatgt

SEQ ID NO: 8684 - DNA, 20 bp, Artificial Sequence
  Description of Artificial Sequence: Synthetic oligonucleotide
  Target: APOC3; (+) strand; PAM type: NRG; PAM sequence: AAG
tagccacgtcttactcctgc

SEQ ID NO: 8685 - DNA, 20 bp, Artificial Sequence
  Description of Artificial Sequence: Synthetic oligonucleotide
  Target: APOC3; (+) strand; PAM type: NRG; PAM sequence: AGG
agccacgtcttactcctgca

SEQ ID NO: 8686 - DNA, 20 bp, Artificial Sequence
  Description of Artificial Sequence: Synthetic oligonucleotide
  Target: APOC3; (+) strand; PAM type: NRG; PAM sequence: TGG
tcctgcaaggctcacctccc

SEQ ID NO: 8687 - DNA, 20 bp, Artificial Sequence
  Description of Artificial Sequence: Synthetic oligonucleotide
  Target: APOC3; (+) strand; PAM type: NRG; PAM sequence: CGG
ctcacctccctggaacccat

SEQ ID NO: 8688 - DNA, 20 bp, Artificial Sequence
  Description of Artificial Sequence: Synthetic oligonucleotide
  Target: APOC3; (+) strand; PAM type: NRG; PAM sequence: CAG
tcccaaccctgctcctgaat

SEQ ID NO: 8689 - DNA, 20 bp, Artificial Sequence
  Description of Artificial Sequence: Synthetic oligonucleotide
  Target: APOC3; (+) strand; PAM type: NRG; PAM sequence: AGG
cccaaccctgctcctgaatc

SEQ ID NO: 8690 - DNA, 20 bp, Artificial Sequence
  Description of Artificial Sequence: Synthetic oligonucleotide
  Target: APOC3; (+) strand; PAM type: NRG; PAM sequence: CAG
ccctgctcctgaatcaggca

SEQ ID NO: 8691 - DNA, 20 bp, Artificial Sequence
  Description of Artificial Sequence: Synthetic oligonucleotide
  Target: APOC3; (+) strand; PAM type: NRG; PAM sequence: CAG
ctcctgaatcaggcacagtc

SEQ ID NO: 8692 - DNA, 20 bp, Artificial Sequence
  Description of Artificial Sequence: Synthetic oligonucleotide
  Target: APOC3; (+) strand; PAM type: NRG; PAM sequence: CAG
atcaggcacagtccagcttg

SEQ ID NO: 8693 - DNA, 20 bp, Artificial Sequence
  Description of Artificial Sequence: Synthetic oligonucleotide
  Target: APOC3; (+) strand; PAM type: NRG; PAM sequence: CGG
aggcacagtccagcttgcag

SEQ ID NO: 8694 - DNA, 20 bp, Artificial Sequence
  Description of Artificial Sequence: Synthetic oligonucleotide
  Target: APOC3; (+) strand; PAM type: NRG; PAM sequence: GGG
ggcacagtccagcttgcagc

SEQ ID NO: 8695 - DNA, 20 bp, Artificial Sequence
  Description of Artificial Sequence: Synthetic oligonucleotide
  Target: APOC3; (+) strand; PAM type: NRG; PAM sequence: GAG
cacagtccagcttgcagcgg

SEQ ID NO: 8696 - DNA, 20 bp, Artificial Sequence
  Description of Artificial Sequence: Synthetic oligonucleotide
  Target: APOC3; (+) strand; PAM type: NRG; PAM sequence: AAG
tccagcttgcagcgggagca

SEQ ID NO: 8697 - DNA, 20 bp, Artificial Sequence
  Description of Artificial Sequence: Synthetic oligonucleotide
  Target: APOC3; (+) strand; PAM type: NRG; PAM sequence: AGG
ccagcttgcagcgggagcaa

SEQ ID NO: 8698 - DNA, 20 bp, Artificial Sequence
  Description of Artificial Sequence: Synthetic oligonucleotide
  Target: APOC3; (+) strand; PAM type: NRG; PAM sequence: CAG
cttgcagcgggagcaaaggt

SEQ ID NO: 8699 - DNA, 20 bp, Artificial Sequence
  Description of Artificial Sequence: Synthetic oligonucleotide
  Target: APOC3; (+) strand; PAM type: NRG; PAM sequence: CAG
cgggagcaaaggtcagtact

SEQ ID NO: 8700 - DNA, 20 bp, Artificial Sequence
  Description of Artificial Sequence: Synthetic oligonucleotide
  Target: APOC3; (+) strand; PAM type: NRG; PAM sequence: CAG
cagtgcccctgtcccttccc

SEQ ID NO: 8701 - DNA, 20 bp, Artificial Sequence
  Description of Artificial Sequence: Synthetic oligonucleotide
  Target: APOC3; (+) strand; PAM type: NRG; PAM sequence: AGG
agtgcccctgtcccttcccc

SEQ ID NO: 8702 - DNA, 20 bp, Artificial Sequence
  Description of Artificial Sequence: Synthetic oligonucleotide
  Target: APOC3; (+) strand; PAM type: NRG; PAM sequence: CAG
cccctgtcccttccccaggc

SEQ ID NO: 8703 - DNA, 20 bp, Artificial Sequence
  Description of Artificial Sequence: Synthetic oligonucleotide
  Target: APOC3; (+) strand; PAM type: NRG; PAM sequence: GAG
cctgtcccttccccaggcca

SEQ ID NO: 8704 - DNA, 20 bp, Artificial Sequence
  Description of Artificial Sequence: Synthetic oligonucleotide
  Target: APOC3; (+) strand; PAM type: NRG; PAM sequence: AGG
ctgtcccttccccaggccag

SEQ ID NO: 8705 - DNA, 20 bp, Artificial Sequence
  Description of Artificial Sequence: Synthetic oligonucleotide
  Target: APOC3; (+) strand; PAM type: NRG; PAM sequence: GGG
tgtcccttccccaggccaga

SEQ ID NO: 8706 - DNA, 20 bp, Artificial Sequence
  Description of Artificial Sequence: Synthetic oligonucleotide
  Target: APOC3; (+) strand; PAM type: NRG; PAM sequence: GGG
gtcccttccccaggccagag

SEQ ID NO: 8707 - DNA, 20 bp, Artificial Sequence
  Description of Artificial Sequence: Synthetic oligonucleotide
  Target: APOC3; (+) strand; PAM type: NRG; PAM sequence: GAG
cccttccccaggccagaggg

SEQ ID NO: 8708 - DNA, 20 bp, Artificial Sequence
  Description of Artificial Sequence: Synthetic oligonucleotide
  Target: APOC3; (+) strand; PAM type: NRG; PAM sequence: AGG
ccttccccaggccagagggg

SEQ ID NO: 8709 - DNA, 20 bp, Artificial Sequence
  Description of Artificial Sequence: Synthetic oligonucleotide
  Target: APOC3; (+) strand; PAM type: NRG; PAM sequence: GAG
ttccccaggccagaggggag

SEQ ID NO: 8710 - DNA, 20 bp, Artificial Sequence
  Description of Artificial Sequence: Synthetic oligonucleotide
  Target: APOC3; (+) strand; PAM type: NRG; PAM sequence: AGG
tccccaggccagaggggagg

SEQ ID NO: 8711 - DNA, 20 bp, Artificial Sequence
  Description of Artificial Sequence: Synthetic oligonucleotide
  Target: APOC3; (+) strand; PAM type: NRG; PAM sequence: GAG
cccaggccagaggggaggag

SEQ ID NO: 8712 - DNA, 20 bp, Artificial Sequence
  Description of Artificial Sequence: Synthetic oligonucleotide
  Target: APOC3; (+) strand; PAM type: NRG; PAM sequence: GAG
ccagaggggaggaggagact

SEQ ID NO: 8713 - DNA, 20 bp, Artificial Sequence
  Description of Artificial Sequence: Synthetic oligonucleotide
  Target: APOC3; (+) strand; PAM type: NRG; PAM sequence: CAG
ctgagtcacgaatgacacct

SEQ ID NO: 8714 - DNA, 20 bp, Artificial Sequence
  Description of Artificial Sequence: Synthetic oligonucleotide
  Target: APOC3; (+) strand; PAM type: NRG; PAM sequence: CAG
cacgaatgacacctcagccg

SEQ ID NO: 8715 - DNA, 20 bp, Artificial Sequence
  Description of Artificial Sequence: Synthetic oligonucleotide
  Target: APOC3; (+) strand; PAM type: NRG; PAM sequence: CAG
ctcagccgcagtttgacctc

SEQ ID NO: 8716 - DNA, 20 bp, Artificial Sequence
  Description of Artificial Sequence: Synthetic oligonucleotide
  Target: APOC3; (+) strand; PAM type: NRG; PAM sequence: AGG
tcagccgcagtttgacctcc

SEQ ID NO: 8717 - DNA, 20 bp, Artificial Sequence
  Description of Artificial Sequence: Synthetic oligonucleotide
  Target: APOC3; (+) strand; PAM type: NRG; PAM sequence: CAG
agtttgacctccaggactta

SEQ ID NO: 8718 - DNA, 20 bp, Artificial Sequence
  Description of Artificial Sequence: Synthetic oligonucleotide
  Target: APOC3; (+) strand; PAM type: NRG; PAM sequence: TAG
acctccaggacttacagtcc

SEQ ID NO: 8719 - DNA, 20 bp, Artificial Sequence
  Description of Artificial Sequence: Synthetic oligonucleotide
  Target: APOC3; (+) strand; PAM type: NRG; PAM sequence: CAG
tccaggacttacagtcctag

SEQ ID NO: 8720 - DNA, 20 bp, Artificial Sequence
  Description of Artificial Sequence: Synthetic oligonucleotide
  Target: APOC3; (+) strand; PAM type: NRG; PAM sequence: CGG
ggacttacagtcctagcagc

SEQ ID NO: 8721 - DNA, 20 bp, Artificial Sequence
  Description of Artificial Sequence: Synthetic oligonucleotide
  Target: APOC3; (+) strand; PAM type: NRG; PAM sequence: TAG
gtcctagcagccggtgccac

SEQ ID NO: 8722 - DNA, 20 bp, Artificial Sequence
  Description of Artificial Sequence: Synthetic oligonucleotide
  Target: APOC3; (+) strand; PAM type: NRG; PAM sequence: GAG
agccggtgccactagcatgt

SEQ ID NO: 8723 - DNA, 20 bp, Artificial Sequence
  Description of Artificial Sequence: Synthetic oligonucleotide
  Target: APOC3; (+) strand; PAM type: NRG; PAM sequence: GAG
ccggtgccactagcatgtga

SEQ ID NO: 8724 - DNA, 20 bp, Artificial Sequence
  Description of Artificial Sequence: Synthetic oligonucleotide
  Target: APOC3; (+) strand; PAM type: NRG; PAM sequence: AGG
cggtgccactagcatgtgag

SEQ ID NO: 8725 - DNA, 20 bp, Artificial Sequence
  Description of Artificial Sequence: Synthetic oligonucleotide
  Target: APOC3; (+) strand; PAM type: NRG; PAM sequence: CAG
ccactagcatgtgagaggtc

SEQ ID NO: 8726 - DNA, 20 bp, Artificial Sequence
  Description of Artificial Sequence: Synthetic oligonucleotide
  Target: APOC3; (+) strand; PAM type: NRG; PAM sequence: GAG
actagcatgtgagaggtcca

SEQ ID NO: 8727 - DNA, 20 bp, Artificial Sequence
  Description of Artificial Sequence: Synthetic oligonucleotide
  Target: APOC3; (+) strand; PAM type: NRG; PAM sequence: AGG
ctagcatgtgagaggtccag

SEQ ID NO: 8728 - DNA, 20 bp, Artificial Sequence
  Description of Artificial Sequence: Synthetic oligonucleotide
  Target: APOC3; (+) strand; PAM type: NRG; PAM sequence: TGG
ttctgtctcacccgcccgcc

SEQ ID NO: 8729 - DNA, 20 bp, Artificial Sequence
  Description of Artificial Sequence: Synthetic oligonucleotide
  Target: APOC3; (+) strand; PAM type: NRG; PAM sequence: GGG
tctgtctcacccgcccgcct

SEQ ID NO: 8730 - DNA, 20 bp, Artificial Sequence
  Description of Artificial Sequence: Synthetic oligonucleotide
  Target: APOC3; (+) strand; PAM type: NRG; PAM sequence: TGG
ccgcctgggtgcacccatgc

SEQ ID NO: 8731 - DNA, 20 bp, Artificial Sequence
  Description of Artificial Sequence: Synthetic oligonucleotide
  Target: APOC3; (+) strand; PAM type: NRG; PAM sequence: GGG
cgcctgggtgcacccatgct

SEQ ID NO: 8732 - DNA, 20 bp, Artificial Sequence
  Description of Artificial Sequence: Synthetic oligonucleotide
  Target: APOC3; (+) strand; PAM type: NRG; PAM sequence: GAG
cctgggtgcacccatgctgg

SEQ ID NO: 8733 - DNA, 20 bp, Artificial Sequence
  Description of Artificial Sequence: Synthetic oligonucleotide
  Target: APOC3; (+) strand; PAM type: NRG; PAM sequence: GAG
tgggagcgcctgcaccattt

SEQ ID NO: 8734 - DNA, 20 bp, Artificial Sequence
  Description of Artificial Sequence: Synthetic oligonucleotide
  Target: APOC3; (+) strand; PAM type: NRG; PAM sequence: GAG
tgcaccatttgagcatgtcc

SEQ ID NO: 8735 - DNA, 20 bp, Artificial Sequence
  Description of Artificial Sequence: Synthetic oligonucleotide
  Target: APOC3; (+) strand; PAM type: NRG; PAM sequence: GAG
caccatttgagcatgtccga

SEQ ID NO: 8736 - DNA, 20 bp, Artificial Sequence
  Description of Artificial Sequence: Synthetic oligonucleotide
  Target: APOC3; (+) strand; PAM type: NRG; PAM sequence: CAG
gcatgtccgagagcatccac

SEQ ID NO: 8737 - DNA, 20 bp, Artificial Sequence
  Description of Artificial Sequence: Synthetic oligonucleotide
  Target: APOC3; (+) strand; PAM type: NRG; PAM sequence: GAG
atgtccgagagcatccacca

SEQ ID NO: 8738 - DNA, 20 bp, Artificial Sequence
  Description of Artificial Sequence: Synthetic oligonucleotide
  Target: APOC3; (+) strand; PAM type: NRG; PAM sequence: TGG
agcatccaccagagtgtgtg

SEQ ID NO: 8739 - DNA, 20 bp, Artificial Sequence
  Description of Artificial Sequence: Synthetic oligonucleotide
  Target: APOC3; (+) strand; PAM type: NRG; PAM sequence: CAG
ccagagtgtgtgtggattca

SEQ ID NO: 8740 - DNA, 20 bp, Artificial Sequence
  Description of Artificial Sequence: Synthetic oligonucleotide
  Target: APOC3; (+) strand; PAM type: NRG; PAM sequence: AAG
gagtgtgtgtggattcacag

SEQ ID NO: 8741 - DNA, 20 bp, Artificial Sequence
  Description of Artificial Sequence: Synthetic oligonucleotide
  Target: APOC3; (+) strand; PAM type: NRG; PAM sequence: AAG
acagaagtgtgcaaatcact

SEQ ID NO: 8742 - DNA, 20 bp, Artificial Sequence
  Description of Artificial Sequence: Synthetic oligonucleotide
  Target: APOC3; (+) strand; PAM type: NRG; PAM sequence: AAG
tgtgcaaatcactaagaacc

SEQ ID NO: 8743 - DNA, 20 bp, Artificial Sequence
  Description of Artificial Sequence: Synthetic oligonucleotide
  Target: APOC3; (+) strand; PAM type: NRG; PAM sequence: AGG
gtgcaaatcactaagaacca

SEQ ID NO: 8744 - DNA, 20 bp, Artificial Sequence
  Description of Artificial Sequence: Synthetic oligonucleotide
  Target: APOC3; (+) strand; PAM type: NRG; PAM sequence: GGG
tgcaaatcactaagaaccaa

SEQ ID NO: 8745 - DNA, 20 bp, Artificial Sequence
  Description of Artificial Sequence: Synthetic oligonucleotide
  Target: APOC3; (+) strand; PAM type: NRG; PAM sequence: TGG
atcactaagaaccaagggac

SEQ ID NO: 8746 - DNA, 20 bp, Artificial Sequence
  Description of Artificial Sequence: Synthetic oligonucleotide
  Target: APOC3; (+) strand; PAM type: NRG; PAM sequence: CAG
taagaaccaagggactggca

SEQ ID NO: 8747 - DNA, 20 bp, Artificial Sequence
  Description of Artificial Sequence: Synthetic oligonucleotide
  Target: APOC3; (+) strand; PAM type: NRG; PAM sequence: GAG
atgcgtgcacccacgctcgc

SEQ ID NO: 8748 - DNA, 20 bp, Artificial Sequence
  Description of Artificial Sequence: Synthetic oligonucleotide
  Target: APOC3; (+) strand; PAM type: NRG; PAM sequence: AGG
tgcgtgcacccacgctcgcg

SEQ ID NO: 8749 - DNA, 20 bp, Artificial Sequence
  Description of Artificial Sequence: Synthetic oligonucleotide
  Target: APOC3; (+) strand; PAM type: NRG; PAM sequence: GGG
gcgtgcacccacgctcgcga

SEQ ID NO: 8750 - DNA, 20 bp, Artificial Sequence
  Description of Artificial Sequence: Synthetic oligonucleotide
  Target: APOC3; (+) strand; PAM type: NRG; PAM sequence: GGG
cgtgcacccacgctcgcgag

SEQ ID NO: 8751 - DNA, 20 bp, Artificial Sequence
  Description of Artificial Sequence: Synthetic oligonucleotide
  Target: APOC3; (+) strand; PAM type: NRG; PAM sequence: TGG
ggacctgctgcctttcaacg

SEQ ID NO: 8752 - DNA, 20 bp, Artificial Sequence
  Description of Artificial Sequence: Synthetic oligonucleotide
  Target: APOC3; (+) strand; PAM type: NRG; PAM sequence: CGG
cctgctgcctttcaacgtgg

SEQ ID NO: 8753 - DNA, 20 bp, Artificial Sequence
  Description of Artificial Sequence: Synthetic oligonucleotide
  Target: APOC3; (+) strand; PAM type: NRG; PAM sequence: GGG
ctgctgcctttcaacgtggc

SEQ ID NO: 8754 - DNA, 20 bp, Artificial Sequence
  Description of Artificial Sequence: Synthetic oligonucleotide
  Target: APOC3; (+) strand; PAM type: NRG; PAM sequence: GGG
tgctgcctttcaacgtggcg

SEQ ID NO: 8755 - DNA, 20 bp, Artificial Sequence
  Description of Artificial Sequence: Synthetic oligonucleotide
  Target: APOC3; (+) strand; PAM type: NRG; PAM sequence: AAG
atgaatgtatttacttccca

SEQ ID NO: 8756 - DNA, 20 bp, Artificial Sequence
  Description of Artificial Sequence: Synthetic oligonucleotide
  Target: APOC3; (+) strand; PAM type: NRG; PAM sequence: GAG
gtatttacttcccaaagtct

SEQ ID NO: 8757 - DNA, 20 bp, Artificial Sequence
  Description of Artificial Sequence: Synthetic oligonucleotide
  Target: APOC3; (+) strand; PAM type: NRG; PAM sequence: AGG
tatttacttcccaaagtctg

SEQ ID NO: 8758 - DNA, 20 bp, Artificial Sequence
  Description of Artificial Sequence: Synthetic oligonucleotide
  Target: APOC3; (+) strand; PAM type: NRG; PAM sequence: GGG
atttacttcccaaagtctga

SEQ ID NO: 8759 - DNA, 20 bp, Artificial Sequence
  Description of Artificial Sequence: Synthetic oligonucleotide
  Target: APOC3; (+) strand; PAM type: NRG; PAM sequence: TAG
gtacgttttgcatcaatctg

SEQ ID NO: 8760 - DNA, 20 bp, Artificial Sequence
  Description of Artificial Sequence: Synthetic oligonucleotide
  Target: APOC3; (+) strand; PAM type: NRG; PAM sequence: TGG
gttttgcatcaatctgtaga

SEQ ID NO: 8761 - DNA, 20 bp, Artificial Sequence
  Description of Artificial Sequence: Synthetic oligonucleotide
  Target: APOC3; (+) strand; PAM type: NRG; PAM sequence: TGG
atctgtagatggatttgttt

SEQ ID NO: 8762 - DNA, 20 bp, Artificial Sequence
  Description of Artificial Sequence: Synthetic oligonucleotide
  Target: APOC3; (+) strand; PAM type: NRG; PAM sequence: GGG
tctgtagatggatttgtttt

SEQ ID NO: 8763 - DNA, 20 bp, Artificial Sequence
  Description of Artificial Sequence: Synthetic oligonucleotide
  Target: APOC3; (+) strand; PAM type: NRG; PAM sequence: GGG
ctgtagatggatttgttttg

SEQ ID NO: 8764 - DNA, 20 bp, Artificial Sequence
  Description of Artificial Sequence: Synthetic oligonucleotide
  Target: APOC3; (+) strand; PAM type: NRG; PAM sequence: GAG
gtagatggatttgttttggg

SEQ ID NO: 8765 - DNA, 20 bp, Artificial Sequence
  Description of Artificial Sequence: Synthetic oligonucleotide
  Target: APOC3; (+) strand; PAM type: NRG; PAM sequence: CAG
gatggatttgttttggggag

SEQ ID NO: 8766 - DNA, 20 bp, Artificial Sequence
  Description of Artificial Sequence: Synthetic oligonucleotide
  Target: APOC3; (+) strand; PAM type: NRG; PAM sequence: AGG
atggatttgttttggggagc

SEQ ID NO: 8767 - DNA, 20 bp, Artificial Sequence
  Description of Artificial Sequence: Synthetic oligonucleotide
  Target: APOC3; (+) strand; PAM type: NRG; PAM sequence: GGG
tggatttgttttggggagca

SEQ ID NO: 8768 - DNA, 20 bp, Artificial Sequence
  Description of Artificial Sequence: Synthetic oligonucleotide
  Target: APOC3; (+) strand; PAM type: NRG; PAM sequence: GAG
gatttgttttggggagcagg

SEQ ID NO: 8769 - DNA, 20 bp, Artificial Sequence
  Description of Artificial Sequence: Synthetic oligonucleotide
  Target: APOC3; (+) strand; PAM type: NRG; PAM sequence: GAG
tttgttttggggagcaggga

SEQ ID NO: 8770 - DNA, 20 bp, Artificial Sequence
  Description of Artificial Sequence: Synthetic oligonucleotide
  Target: APOC3; (+) strand; PAM type: NRG; PAM sequence: GAG
ttggggagcagggagagaat

SEQ ID NO: 8771 - DNA, 20 bp, Artificial Sequence
  Description of Artificial Sequence: Synthetic oligonucleotide
  Target: APOC3; (+) strand; PAM type: NRG; PAM sequence: GAG
ggggagcagggagagaatga

SEQ ID NO: 8772 - DNA, 20 bp, Artificial Sequence
  Description of Artificial Sequence: Synthetic oligonucleotide
  Target: APOC3; (+) strand; PAM type: NRG; PAM sequence: CAG
gaatgagagccccctgtgct

SEQ ID NO: 8773 - DNA, 20 bp, Artificial Sequence
  Description of Artificial Sequence: Synthetic oligonucleotide
  Target: APOC3; (+) strand; PAM type: NRG; PAM sequence: TAG
gagccccctgtgctcagtct

SEQ ID NO: 8774 - DNA, 20 bp, Artificial Sequence
  Description of Artificial Sequence: Synthetic oligonucleotide
  Target: APOC3; (+) strand; PAM type: NRG; PAM sequence: GAG
gccccctgtgctcagtctta

SEQ ID NO: 8775 - DNA, 20 bp, Artificial Sequence
  Description of Artificial Sequence: Synthetic oligonucleotide
  Target: APOC3; (+) strand; PAM type: NRG; PAM sequence: AGG
ccccctgtgctcagtcttag

SEQ ID NO: 8776 - DNA, 20 bp, Artificial Sequence
  Description of Artificial Sequence: Synthetic oligonucleotide
  Target: APOC3; (+) strand; PAM type: NRG; PAM sequence: GGG
cccctgtgctcagtcttaga

SEQ ID NO: 8777 - DNA, 20 bp, Artificial Sequence
  Description of Artificial Sequence: Synthetic oligonucleotide
  Target: APOC3; (+) strand; PAM type: NRG; PAM sequence: AAG
tgctcagtcttagagggtgc

SEQ ID NO: 8778 - DNA, 20 bp, Artificial Sequence
  Description of Artificial Sequence: Synthetic oligonucleotide
  Target: APOC3; (+) strand; PAM type: NRG; PAM sequence: TAG
tcagtcttagagggtgcaag

SEQ ID NO: 8779 - DNA, 20 bp, Artificial Sequence
  Description of Artificial Sequence: Synthetic oligonucleotide
  Target: APOC3; (+) strand; PAM type: NRG; PAM sequence: TGG
tagagggtgcaagtagctga

SEQ ID NO: 8780 - DNA, 20 bp, Artificial Sequence
  Description of Artificial Sequence: Synthetic oligonucleotide
  Target: APOC3; (+) strand; PAM type: NRG; PAM sequence: GGG
agagggtgcaagtagctgat

SEQ ID NO: 8781 - DNA, 20 bp, Artificial Sequence
  Description of Artificial Sequence: Synthetic oligonucleotide
  Target: APOC3; (+) strand; PAM type: NRG; PAM sequence: AAG
gggtgcaagtagctgatggg

SEQ ID NO: 8782 - DNA, 20 bp, Artificial Sequence
  Description of Artificial Sequence: Synthetic oligonucleotide
  Target: APOC3; (+) strand; PAM type: NRG; PAM sequence: GAG
gtgcaagtagctgatgggaa

SEQ ID NO: 8783 - DNA, 20 bp, Artificial Sequence
  Description of Artificial Sequence: Synthetic oligonucleotide
  Target: APOC3; (+) strand; PAM type: NRG; PAM sequence: CAG
caagtagctgatgggaagag

SEQ ID NO: 8784 - DNA, 20 bp, Artificial Sequence
  Description of Artificial Sequence: Synthetic oligonucleotide
  Target: APOC3; (+) strand; PAM type: NRG; PAM sequence: CAG
gggaagagcagactgccttc

SEQ ID NO: 8785 - DNA, 20 bp, Artificial Sequence
  Description of Artificial Sequence: Synthetic oligonucleotide
  Target: APOC3; (+) strand; PAM type: NRG; PAM sequence: CAG
agagcagactgccttccagc

SEQ ID NO: 8786 - DNA, 20 bp, Artificial Sequence
  Description of Artificial Sequence: Synthetic oligonucleotide
  Target: APOC3; (+) strand; PAM type: NRG; PAM sequence: AGG
gagcagactgccttccagcc

SEQ ID NO: 8787 - DNA, 20 bp, Artificial Sequence
  Description of Artificial Sequence: Synthetic oligonucleotide
  Target: APOC3; (+) strand; PAM type: NRG; PAM sequence: TGG
gactgccttccagccaggcc

SEQ ID NO: 8788 - DNA, 20 bp, Artificial Sequence
  Description of Artificial Sequence: Synthetic oligonucleotide
  Target: APOC3; (+) strand; PAM type: NRG; PAM sequence: GAG
ccagccaggcctggtcctgt

SEQ ID NO: 8789 - DNA, 20 bp, Artificial Sequence
  Description of Artificial Sequence: Synthetic oligonucleotide
  Target: APOC3; (+) strand; PAM type: NRG; PAM sequence: CAG
ccaggcctggtcctgtgagt

SEQ ID NO: 8790 - DNA, 20 bp, Artificial Sequence
  Description of Artificial Sequence: Synthetic oligonucleotide
  Target: APOC3; (+) strand; PAM type: NRG; PAM sequence: AGG
caggcctggtcctgtgagtc

SEQ ID NO: 8791 - DNA, 20 bp, Artificial Sequence
  Description of Artificial Sequence: Synthetic oligonucleotide
  Target: APOC3; (+) strand; PAM type: NRG; PAM sequence: GGG
aggcctggtcctgtgagtca

SEQ ID NO: 8792 - DNA, 20 bp, Artificial Sequence
  Description of Artificial Sequence: Synthetic oligonucleotide
  Target: APOC3; (+) strand; PAM type: NRG; PAM sequence: TAG
tgagtcagggacgtccatct

SEQ ID NO: 8793 - DNA, 20 bp, Artificial Sequence
  Description of Artificial Sequence: Synthetic oligonucleotide
  Target: APOC3; (+) strand; PAM type: NRG; PAM sequence: TGG
gtcagggacgtccatcttag

SEQ ID NO: 8794 - DNA, 20 bp, Artificial Sequence
  Description of Artificial Sequence: Synthetic oligonucleotide
  Target: APOC3; (+) strand; PAM type: NRG; PAM sequence: GGG
tcagggacgtccatcttagt

SEQ ID NO: 8795 - DNA, 20 bp, Artificial Sequence
  Description of Artificial Sequence: Synthetic oligonucleotide
  Target: APOC3; (+) strand; PAM type: NRG; PAM sequence: AAG
gtccatcttagtgggcatga

SEQ ID NO: 8796 - DNA, 20 bp, Artificial Sequence
  Description of Artificial Sequence: Synthetic oligonucleotide
  Target: APOC3; (+) strand; PAM type: NRG; PAM sequence: AGG
tccatcttagtgggcatgaa

SEQ ID NO: 8797 - DNA, 20 bp, Artificial Sequence
  Description of Artificial Sequence: Synthetic oligonucleotide
  Target: APOC3; (+) strand; PAM type: NRG; PAM sequence: GAG
tgaaaggcctgtgtgatctc

SEQ ID NO: 8798 - DNA, 20 bp, Artificial Sequence
  Description of Artificial Sequence: Synthetic oligonucleotide
  Target: APOC3; (+) strand; PAM type: NRG; PAM sequence: AGG
gaaaggcctgtgtgatctcg

SEQ ID NO: 8799 - DNA, 20 bp, Artificial Sequence
  Description of Artificial Sequence: Synthetic oligonucleotide
  Target: APOC3; (+) strand; PAM type: NRG; PAM sequence: GGG
aaaggcctgtgtgatctcga

SEQ ID NO: 8800 - DNA, 20 bp, Artificial Sequence
  Description of Artificial Sequence: Synthetic oligonucleotide
  Target: APOC3; (+) strand; PAM type: NRG; PAM sequence: GAG
aggcctgtgtgatctcgagg

SEQ ID NO: 8801 - DNA, 20 bp, Artificial Sequence
  Description of Artificial Sequence: Synthetic oligonucleotide
  Target: APOC3; (+) strand; PAM type: NRG; PAM sequence: AAG
gagggagacatcgcctctcc

SEQ ID NO: 8802 - DNA, 20 bp, Artificial Sequence
  Description of Artificial Sequence: Synthetic oligonucleotide
  Target: APOC3; (+) strand; PAM type: NRG; PAM sequence: CAG
gcctctccttatctgtgcaa

SEQ ID NO: 8803 - DNA, 20 bp, Artificial Sequence
  Description of Artificial Sequence: Synthetic oligonucleotide
  Target: APOC3; (+) strand; PAM type: NRG; PAM sequence: AGG
cctctccttatctgtgcaac

SEQ ID NO: 8804 - DNA, 20 bp, Artificial Sequence
  Description of Artificial Sequence: Synthetic oligonucleotide
  Target: APOC3; (+) strand; PAM type: NRG; PAM sequence: CAG
ctccttatctgtgcaacagg

SEQ ID NO: 8805 - DNA, 20 bp, Artificial Sequence
  Description of Artificial Sequence: Synthetic oligonucleotide
  Target: APOC3; (+) strand; PAM type: NRG; PAM sequence: TGG
caacaggcagacttaatgat

SEQ ID NO: 8806 - DNA, 20 bp, Artificial Sequence
  Description of Artificial Sequence: Synthetic oligonucleotide
  Target: APOC3; (+) strand; PAM type: NRG; PAM sequence: GAG
aggcagacttaatgattggt

SEQ ID NO: 8807 - DNA, 20 bp, Artificial Sequence
  Description of Artificial Sequence: Synthetic oligonucleotide
  Target: APOC3; (+) strand; PAM type: NRG; PAM sequence: AGG
ggcagacttaatgattggtg

SEQ ID NO: 8808 - DNA, 20 bp, Artificial Sequence
  Description of Artificial Sequence: Synthetic oligonucleotide
  Target: APOC3; (+) strand; PAM type: NRG; PAM sequence: GAG
ttaatgattggtgaggcaat

SEQ ID NO: 8809 - DNA, 20 bp, Artificial Sequence
  Description of Artificial Sequence: Synthetic oligonucleotide
  Target: APOC3; (+) strand; PAM type: NRG; PAM sequence: AGG
taatgattggtgaggcaatg

SEQ ID NO: 8810 - DNA, 20 bp, Artificial Sequence
  Description of Artificial Sequence: Synthetic oligonucleotide
  Target: APOC3; (+) strand; PAM type: NRG; PAM sequence: TAG
tggtgaggcaatgaggctga

SEQ ID NO: 8811 - DNA, 20 bp, Artificial Sequence
  Description of Artificial Sequence: Synthetic oligonucleotide
  Target: APOC3; (+) strand; PAM type: NRG; PAM sequence: CAG
aggcaatgaggctgatagct

SEQ ID NO: 8812 - DNA, 20 bp, Artificial Sequence
  Description of Artificial Sequence: Synthetic oligonucleotide
  Target: APOC3; (+) strand; PAM type: NRG; PAM sequence: TAG
tgaggctgatagctcagcat

SEQ ID NO: 8813 - DNA, 20 bp, Artificial Sequence
  Description of Artificial Sequence: Synthetic oligonucleotide
  Target: APOC3; (+) strand; PAM type: NRG; PAM sequence: CAG
tgatagctcagcattagcta

SEQ ID NO: 8814 - DNA, 20 bp, Artificial Sequence
  Description of Artificial Sequence: Synthetic oligonucleotide
  Target: APOC3; (+) strand; PAM type: NRG; PAM sequence: TGG
ttagctacagccacccctcc

SEQ ID NO: 8815 - DNA, 20 bp, Artificial Sequence
  Description of Artificial Sequence: Synthetic oligonucleotide
  Target: APOC3; (+) strand; PAM type: NRG; PAM sequence: CAG
acccctcctggccaaccaca

SEQ ID NO: 8816 - DNA, 20 bp, Artificial Sequence
  Description of Artificial Sequence: Synthetic oligonucleotide
  Target: APOC3; (+) strand; PAM type: NRG; PAM sequence: AGG
cccctcctggccaaccacac

SEQ ID NO: 8817 - DNA, 20 bp, Artificial Sequence
  Description of Artificial Sequence: Synthetic oligonucleotide
  Target: APOC3; (+) strand; PAM type: NRG; PAM sequence: GGG
ccctcctggccaaccacaca

SEQ ID NO: 8818 - DNA, 20 bp, Artificial Sequence
  Description of Artificial Sequence: Synthetic oligonucleotide
  Target: APOC3; (+) strand; PAM type: NRG; PAM sequence: CAG
caaccacacagggatcaaac

SEQ ID NO: 8819 - DNA, 20 bp, Artificial Sequence
  Description of Artificial Sequence: Synthetic oligonucleotide
  Target: APOC3; (+) strand; PAM type: NRG; PAM sequence: AGG
aaccacacagggatcaaacc

SEQ ID NO: 8820 - DNA, 20 bp, Artificial Sequence
  Description of Artificial Sequence: Synthetic oligonucleotide
  Target: APOC3; (+) strand; PAM type: NRG; PAM sequence: GGG
accacacagggatcaaacca

SEQ ID NO: 8821 - DNA, 20 bp, Artificial Sequence
  Description of Artificial Sequence: Synthetic oligonucleotide
  Target: APOC3; (+) strand; PAM type: NRG; PAM sequence: GGG
ccacacagggatcaaaccag

SEQ ID NO: 8822 - DNA, 20 bp, Artificial Sequence
  Description of Artificial Sequence: Synthetic oligonucleotide
  Target: APOC3; (+) strand; PAM type: NRG; PAM sequence: CAG
acagggatcaaaccaggggt

SEQ ID NO: 8823 - DNA, 20 bp, Artificial Sequence
  Description of Artificial Sequence: Synthetic oligonucleotide
  Target: APOC3; (+) strand; PAM type: NRG; PAM sequence: CAG
gatcaaaccaggggtcagtc

SEQ ID NO: 8824 - DNA, 20 bp, Artificial Sequence
  Description of Artificial Sequence: Synthetic oligonucleotide
  Target: APOC3; (+) strand; PAM type: NRG; PAM sequence: GAG
tcaaaccaggggtcagtcca

SEQ ID NO: 8825 - DNA, 20 bp, Artificial Sequence
  Description of Artificial Sequence: Synthetic oligonucleotide
  Target: APOC3; (+) strand; PAM type: NRG; PAM sequence: AGG
caaaccaggggtcagtccag

SEQ ID NO: 8826 - DNA, 20 bp, Artificial Sequence
  Description of Artificial Sequence: Synthetic oligonucleotide
  Target: APOC3; (+) strand; PAM type: NRG; PAM sequence: CAG
ccaggggtcagtccagaggt

SEQ ID NO: 8827 - DNA, 20 bp, Artificial Sequence
  Description of Artificial Sequence: Synthetic oligonucleotide
  Target: APOC3; (+) strand; PAM type: NRG; PAM sequence: GAG
aggggtcagtccagaggtca

SEQ ID NO: 8828 - DNA, 20 bp, Artificial Sequence
  Description of Artificial Sequence: Synthetic oligonucleotide
  Target: APOC3; (+) strand; PAM type: NRG; PAM sequence: CAG
gtcagtccagaggtcagagt

SEQ ID NO: 8829 - DNA, 20 bp, Artificial Sequence
  Description of Artificial Sequence: Synthetic oligonucleotide
  Target: APOC3; (+) strand; PAM type: NRG; PAM sequence: AGG
tcagtccagaggtcagagtc

SEQ ID NO: 8830 - DNA, 20 bp, Artificial Sequence
  Description of Artificial Sequence: Synthetic oligonucleotide
  Target: APOC3; (+) strand; PAM type: NRG; PAM sequence: GAG
agtccagaggtcagagtcag

SEQ ID NO: 8831 - DNA, 20 bp, Artificial Sequence
  Description of Artificial Sequence: Synthetic oligonucleotide
  Target: APOC3; (+) strand; PAM type: NRG; PAM sequence: CAG
ccagaggtcagagtcaggag

SEQ ID NO: 8832 - DNA, 20 bp, Artificial Sequence
  Description of Artificial Sequence: Synthetic oligonucleotide
  Target: APOC3; (+) strand; PAM type: NRG; PAM sequence: CAG
agagtcaggagcagacaact

SEQ ID NO: 8833 - DNA, 20 bp, Artificial Sequence
  Description of Artificial Sequence: Synthetic oligonucleotide
  Target: APOC3; (+) strand; PAM type: NRG; PAM sequence: CAG
aggagcagacaactcagatc

SEQ ID NO: 8834 - DNA, 20 bp, Artificial Sequence
  Description of Artificial Sequence: Synthetic oligonucleotide
  Target: APOC3; (+) strand; PAM type: NRG; PAM sequence: CAG
gcagacaactcagatccagc

SEQ ID NO: 8835 - DNA, 20 bp, Artificial Sequence
  Description of Artificial Sequence: Synthetic oligonucleotide
  Target: APOC3; (+) strand; PAM type: NRG; PAM sequence: AGG
cagacaactcagatccagcc

SEQ ID NO: 8836 - DNA, 20 bp, Artificial Sequence
  Description of Artificial Sequence: Synthetic oligonucleotide
  Target: APOC3; (+) strand; PAM type: NRG; PAM sequence: GGG
agacaactcagatccagcca

SEQ ID NO: 8837 - DNA, 20 bp, Artificial Sequence
  Description of Artificial Sequence: Synthetic oligonucleotide
  Target: APOC3; (+) strand; PAM type: NRG; PAM sequence: CAG
aactcagatccagccaggga

SEQ ID NO: 8838 - DNA, 20 bp, Artificial Sequence
  Description of Artificial Sequence: Synthetic oligonucleotide
  Target: APOC3; (+) strand; PAM type: NRG; PAM sequence: AGG
actcagatccagccagggac

SEQ ID NO: 8839 - DNA, 20 bp, Artificial Sequence
  Description of Artificial Sequence: Synthetic oligonucleotide
  Target: APOC3; (+) strand; PAM type: NRG; PAM sequence: CAG
cagatccagccagggacagg

SEQ ID NO: 8840 - DNA, 20 bp, Artificial Sequence
  Description of Artificial Sequence: Synthetic oligonucleotide
  Target: APOC3; (+) strand; PAM type: NRG; PAM sequence: AGG
agatccagccagggacaggc

SEQ ID NO: 8841 - DNA, 20 bp, Artificial Sequence
  Description of Artificial Sequence: Synthetic oligonucleotide
  Target: APOC3; (+) strand; PAM type: NRG; PAM sequence: CGG
ccagggacaggcaggtcaca

SEQ ID NO: 8842 - DNA, 20 bp, Artificial Sequence
  Description of Artificial Sequence: Synthetic oligonucleotide
  Target: APOC3; (+) strand; PAM type: NRG; PAM sequence: AAG
atgtgcctcacgtatgcttc

SEQ ID NO: 8843 - DNA, 20 bp, Artificial Sequence
  Description of Artificial Sequence: Synthetic oligonucleotide
  Target: APOC3; (+) strand; PAM type: NRG; PAM sequence: AGG
tgtgcctcacgtatgcttca

SEQ ID NO: 8844 - DNA, 20 bp, Artificial Sequence
  Description of Artificial Sequence: Synthetic oligonucleotide
  Target: APOC3; (+) strand; PAM type: NRG; PAM sequence: GGG
gtgcctcacgtatgcttcaa

SEQ ID NO: 8845 - DNA, 20 bp, Artificial Sequence
  Description of Artificial Sequence: Synthetic oligonucleotide
  Target: APOC3; (+) strand; PAM type: NRG; PAM sequence: GGG
tgcctcacgtatgcttcaag

SEQ ID NO: 8846 - DNA, 20 bp, Artificial Sequence
  Description of Artificial Sequence: Synthetic oligonucleotide
  Target: APOC3; (+) strand; PAM type: NRG; PAM sequence: CGG
tgcttcaaggggccctcccc

SEQ ID NO: 8847 - DNA, 20 bp, Artificial Sequence
  Description of Artificial Sequence: Synthetic oligonucleotide
  Target: APOC3; (+) strand; PAM type: NRG; PAM sequence: GGG
gcttcaaggggccctccccc

SEQ ID NO: 8848 - DNA, 20 bp, Artificial Sequence
  Description of Artificial Sequence: Synthetic oligonucleotide
  Target: APOC3; (+) strand; PAM type: NRG; PAM sequence: CAG
tcaaggggccctcccccggg

SEQ ID NO: 8849 - DNA, 20 bp, Artificial Sequence
  Description of Artificial Sequence: Synthetic oligonucleotide
  Target: APOC3; (+) strand; PAM type: NRG; PAM sequence: AAG
ccctcccccgggcagaactg

SEQ ID NO: 8850 - DNA, 20 bp, Artificial Sequence
  Description of Artificial Sequence: Synthetic oligonucleotide
  Target: APOC3; (+) strand; PAM type: NRG; PAM sequence: AGG
cctcccccgggcagaactga

SEQ ID NO: 8851 - DNA, 20 bp, Artificial Sequence
  Description of Artificial Sequence: Synthetic oligonucleotide
  Target: APOC3; (+) strand; PAM type: NRG; PAM sequence: CAG
ccccgggcagaactgaagga

SEQ ID NO: 8852 - DNA, 20 bp, Artificial Sequence
  Description of Artificial Sequence: Synthetic oligonucleotide
  Target: APOC3; (+) strand; PAM type: NRG; PAM sequence: TAG
aaggacagctcctgttgcca

SEQ ID NO: 8853 - DNA, 20 bp, Artificial Sequence
  Description of Artificial Sequence: Synthetic oligonucleotide
  Target: APOC3; (+) strand; PAM type: NRG; PAM sequence: AGG
aggacagctcctgttgccat

SEQ ID NO: 8854 - DNA, 20 bp, Artificial Sequence
  Description of Artificial Sequence: Synthetic oligonucleotide
  Target: APOC3; (+) strand; PAM type: NRG; PAM sequence: GAG
gacagctcctgttgccatag

SEQ ID NO: 8855 - DNA, 20 bp, Artificial Sequence
  Description of Artificial Sequence: Synthetic oligonucleotide
  Target: APOC3; (+) strand; PAM type: NRG; PAM sequence: AGG
acagctcctgttgccatagg

SEQ ID NO: 8856 - DNA, 20 bp, Artificial Sequence
  Description of Artificial Sequence: Synthetic oligonucleotide
  Target: APOC3; (+) strand; PAM type: NRG; PAM sequence: GGG
cagctcctgttgccatagga

SEQ ID NO: 8857 - DNA, 20 bp, Artificial Sequence
  Description of Artificial Sequence: Synthetic oligonucleotide
  Target: APOC3; (+) strand; PAM type: NRG; PAM sequence: GAG
gctcctgttgccataggagg

SEQ ID NO: 8858 - DNA, 20 bp, Artificial Sequence
  Description of Artificial Sequence: Synthetic oligonucleotide
  Target: APOC3; (+) strand; PAM type: NRG; PAM sequence: TGG
ctgttgccataggagggagc

SEQ ID NO: 8859 - DNA, 20 bp, Artificial Sequence
  Description of Artificial Sequence: Synthetic oligonucleotide
  Target: APOC3; (+) strand; PAM type: NRG; PAM sequence: GGG
tgttgccataggagggagct

SEQ ID NO: 8860 - DNA, 20 bp, Artificial Sequence
  Description of Artificial Sequence: Synthetic oligonucleotide
  Target: APOC3; (+) strand; PAM type: NRG; PAM sequence: GAG
gccataggagggagctgggt

SEQ ID NO: 8861 - DNA, 20 bp, Artificial Sequence
  Description of Artificial Sequence: Synthetic oligonucleotide
  Target: APOC3; (+) strand; PAM type: NRG; PAM sequence: TAG
gagggagctgggtgagatac

SEQ ID NO: 8862 - DNA, 20 bp, Artificial Sequence
  Description of Artificial Sequence: Synthetic oligonucleotide
  Target: APOC3; (+) strand; PAM type: NRG; PAM sequence: AGG
agggagctgggtgagatact

SEQ ID NO: 8863 - DNA, 20 bp, Artificial Sequence
  Description of Artificial Sequence: Synthetic oligonucleotide
  Target: APOC3; (+) strand; PAM type: NRG; PAM sequence: GAG
ggagctgggtgagatactag

SEQ ID NO: 8864 - DNA, 20 bp, Artificial Sequence
  Description of Artificial Sequence: Synthetic oligonucleotide
  Target: APOC3; (+) strand; PAM type: NRG; PAM sequence: AGG
gagctgggtgagatactagg

SEQ ID NO: 8865 - DNA, 20 bp, Artificial Sequence
  Description of Artificial Sequence: Synthetic oligonucleotide
  Target: APOC3; (+) strand; PAM type: NRG; PAM sequence: CGG
gagatactaggaggaacttc

SEQ ID NO: 8866 - DNA, 20 bp, Artificial Sequence
  Description of Artificial Sequence: Synthetic oligonucleotide
  Target: APOC3; (+) strand; PAM type: NRG; PAM sequence: AAG
catgatgatgtgtgatgaac

SEQ ID NO: 8867 - DNA, 20 bp, Artificial Sequence
  Description of Artificial Sequence: Synthetic oligonucleotide
  Target: APOC3; (+) strand; PAM type: NRG; PAM sequence: AGG
atgatgatgtgtgatgaaca

SEQ ID NO: 8868 - DNA, 20 bp, Artificial Sequence
  Description of Artificial Sequence: Synthetic oligonucleotide
  Target: APOC3; (+) strand; PAM type: NRG; PAM sequence: GGG
tgatgatgtgtgatgaacaa

SEQ ID NO: 8869 - DNA, 20 bp, Artificial Sequence
  Description of Artificial Sequence: Synthetic oligonucleotide
  Target: APOC3; (+) strand; PAM type: NRG; PAM sequence: TGG
gtgtgatgaacaagggcctc

SEQ ID NO: 8870 - DNA, 20 bp, Artificial Sequence
  Description of Artificial Sequence: Synthetic oligonucleotide
  Target: APOC3; (+) strand; PAM type: NRG; PAM sequence: CAG
gaacaagggcctctggccaa

SEQ ID NO: 8871 - DNA, 20 bp, Artificial Sequence
  Description of Artificial Sequence: Synthetic oligonucleotide
  Target: APOC3; (+) strand; PAM type: NRG; PAM sequence: AGG
aacaagggcctctggccaac

SEQ ID NO: 8872 - DNA, 20 bp, Artificial Sequence
  Description of Artificial Sequence: Synthetic oligonucleotide
  Target: APOC3; (+) strand; PAM type: NRG; PAM sequence: CAG
tctggccaacaggtctgaat

SEQ ID NO: 8873 - DNA, 20 bp, Artificial Sequence
  Description of Artificial Sequence: Synthetic oligonucleotide
  Target: APOC3; (+) strand; PAM type: NRG; PAM sequence: AGG
ctggccaacaggtctgaatc

SEQ ID NO: 8874 - DNA, 20 bp, Artificial Sequence
  Description of Artificial Sequence: Synthetic oligonucleotide
  Target: APOC3; (+) strand; PAM type: NRG; PAM sequence: GGG
tggccaacaggtctgaatca

SEQ ID NO: 8875 - DNA, 20 bp, Artificial Sequence
  Description of Artificial Sequence: Synthetic oligonucleotide
  Target: APOC3; (+) strand; PAM type: NRG; PAM sequence: CAG
aggtctgaatcagggctgcc

SEQ ID NO: 8876 - DNA, 20 bp, Artificial Sequence
  Description of Artificial Sequence: Synthetic oligonucleotide
  Target: APOC3; (+) strand; PAM type: NRG; PAM sequence: CAG
tgaatcagggctgcccagcc

SEQ ID NO: 8877 - DNA, 20 bp, Artificial Sequence
  Description of Artificial Sequence: Synthetic oligonucleotide
  Target: APOC3; (+) strand; PAM type: NRG; PAM sequence: TGG
cagggctgcccagcccagcc

SEQ ID NO: 8878 - DNA, 20 bp, Artificial Sequence
  Description of Artificial Sequence: Synthetic oligonucleotide
  Target: APOC3; (+) strand; PAM type: NRG; PAM sequence: TGG
ggctgcccagcccagcctgg

SEQ ID NO: 8879 - DNA, 20 bp, Artificial Sequence
  Description of Artificial Sequence: Synthetic oligonucleotide
  Target: APOC3; (+) strand; PAM type: NRG; PAM sequence: GGG
gctgcccagcccagcctggt

SEQ ID NO: 8880 - DNA, 20 bp, Artificial Sequence
  Description of Artificial Sequence: Synthetic oligonucleotide
  Target: APOC3; (+) strand; PAM type: NRG; PAM sequence: AAG
gcccagcccagcctggtggg

SEQ ID NO: 8881 - DNA, 20 bp, Artificial Sequence
  Description of Artificial Sequence: Synthetic oligonucleotide
  Target: APOC3; (+) strand; PAM type: NRG; PAM sequence: AGG
cccagcccagcctggtggga

SEQ ID NO: 8882 - DNA, 20 bp, Artificial Sequence
  Description of Artificial Sequence: Synthetic oligonucleotide
  Target: APOC3; (+) strand; PAM type: NRG; PAM sequence: GGG
ccagcccagcctggtgggaa

SEQ ID NO: 8883 - DNA, 20 bp, Artificial Sequence
  Description of Artificial Sequence: Synthetic oligonucleotide
  Target: APOC3; (+) strand; PAM type: NRG; PAM sequence: TGG
ccagcctggtgggaagggca

SEQ ID NO: 8884 - DNA, 20 bp, Artificial Sequence
  Description of Artificial Sequence: Synthetic oligonucleotide
  Target: APOC3; (+) strand; PAM type: NRG; PAM sequence: GAG
agcctggtgggaagggcatg

SEQ ID NO: 8885 - DNA, 20 bp, Artificial Sequence
  Description of Artificial Sequence: Synthetic oligonucleotide
  Target: APOC3; (+) strand; PAM type: NRG; PAM sequence: TGG
ggtgggaagggcatggagca

SEQ ID NO: 8886 - DNA, 20 bp, Artificial Sequence
  Description of Artificial Sequence: Synthetic oligonucleotide
  Target: APOC3; (+) strand; PAM type: NRG; PAM sequence: GGG
gtgggaagggcatggagcat

SEQ ID NO: 8887 - DNA, 20 bp, Artificial Sequence
  Description of Artificial Sequence: Synthetic oligonucleotide
  Target: APOC3; (+) strand; PAM type: NRG; PAM sequence: GGG
tgggaagggcatggagcatg

SEQ ID NO: 8888 - DNA, 20 bp, Artificial Sequence
  Description of Artificial Sequence: Synthetic oligonucleotide
  Target: APOC3; (+) strand; PAM type: NRG; PAM sequence: GGG
gggaagggcatggagcatgg

SEQ ID NO: 8889 - DNA, 20 bp, Artificial Sequence
  Description of Artificial Sequence: Synthetic oligonucleotide
  Target: APOC3; (+) strand; PAM type: NRG; PAM sequence: TGG
ctcatgtactaaacctcacc

SEQ ID NO: 8890 - DNA, 20 bp, Artificial Sequence
  Description of Artificial Sequence: Synthetic oligonucleotide
  Target: APOC3; (+) strand; PAM type: NRG; PAM sequence: AAG
actaaacctcacctggacac

SEQ ID NO: 8891 - DNA, 20 bp, Artificial Sequence
  Description of Artificial Sequence: Synthetic oligonucleotide
  Target: APOC3; (+) strand; PAM type: NRG; PAM sequence: AGG
ctaaacctcacctggacaca

SEQ ID NO: 8892 - DNA, 20 bp, Artificial Sequence
  Description of Artificial Sequence: Synthetic oligonucleotide
  Target: APOC3; (+) strand; PAM type: NRG; PAM sequence: CAG
cacctggacacaaggtgaaa

SEQ ID NO: 8893 - DNA, 20 bp, Artificial Sequence
  Description of Artificial Sequence: Synthetic oligonucleotide
  Target: APOC3; (+) strand; PAM type: NRG; PAM sequence: CAG
aaggtgaaacagcccaaccc

SEQ ID NO: 8894 - DNA, 20 bp, Artificial Sequence
  Description of Artificial Sequence: Synthetic oligonucleotide
  Target: APOC3; (+) strand; PAM type: NRG; PAM sequence: GAG
ggtgaaacagcccaacccca

SEQ ID NO: 8895 - DNA, 20 bp, Artificial Sequence
  Description of Artificial Sequence: Synthetic oligonucleotide
  Target: APOC3; (+) strand; PAM type: NRG; PAM sequence: AGG
gtgaaacagcccaaccccag

SEQ ID NO: 8896 - DNA, 20 bp, Artificial Sequence
  Description of Artificial Sequence: Synthetic oligonucleotide
  Target: APOC3; (+) strand; PAM type: NRG; PAM sequence: TGG
caaccccagaggaccatttt

SEQ ID NO: 8897 - DNA, 20 bp, Artificial Sequence
  Description of Artificial Sequence: Synthetic oligonucleotide
  Target: APOC3; (+) strand; PAM type: NRG; PAM sequence: CGG
cagaggaccatttttggccc

SEQ ID NO: 8898 - DNA, 20 bp, Artificial Sequence
  Description of Artificial Sequence: Synthetic oligonucleotide
  Target: APOC3; (+) strand; PAM type: NRG; PAM sequence: TGG
ggaccatttttggccccgga

SEQ ID NO: 8899 - DNA, 20 bp, Artificial Sequence
  Description of Artificial Sequence: Synthetic oligonucleotide
  Target: APOC3; (+) strand; PAM type: NRG; PAM sequence: TGG
ctcttcctcccatctaccac

SEQ ID NO: 8900 - DNA, 20 bp, Artificial Sequence
  Description of Artificial Sequence: Synthetic oligonucleotide
  Target: APOC3; (+) strand; PAM type: NRG; PAM sequence: TGG
atctaccactggcttctccc

SEQ ID NO: 8901 - DNA, 20 bp, Artificial Sequence
  Description of Artificial Sequence: Synthetic oligonucleotide
  Target: APOC3; (+) strand; PAM type: NRG; PAM sequence: GAG
ctaccactggcttctccctg

SEQ ID NO: 8902 - DNA, 20 bp, Artificial Sequence
  Description of Artificial Sequence: Synthetic oligonucleotide
  Target: APOC3; (+) strand; PAM type: NRG; PAM sequence: CAG
ccactggcttctccctggag

SEQ ID NO: 8903 - DNA, 20 bp, Artificial Sequence
  Description of Artificial Sequence: Synthetic oligonucleotide
  Target: APOC3; (+) strand; PAM type: NRG; PAM sequence: CAG
ccctggagcagtcttcatcc

SEQ ID NO: 8904 - DNA, 20 bp, Artificial Sequence
  Description of Artificial Sequence: Synthetic oligonucleotide
  Target: APOC3; (+) strand; PAM type: NRG; PAM sequence: AGG
cctggagcagtcttcatccc

SEQ ID NO: 8905 - DNA, 20 bp, Artificial Sequence
  Description of Artificial Sequence: Synthetic oligonucleotide
  Target: APOC3; (+) strand; PAM type: NRG; PAM sequence: GGG
ctggagcagtcttcatccca

SEQ ID NO: 8906 - DNA, 20 bp, Artificial Sequence
  Description of Artificial Sequence: Synthetic oligonucleotide
  Target: APOC3; (+) strand; PAM type: NRG; PAM sequence: GGG
tggagcagtcttcatcccag

SEQ ID NO: 8907 - DNA, 20 bp, Artificial Sequence
  Description of Artificial Sequence: Synthetic oligonucleotide
  Target: APOC3; (+) strand; PAM type: NRG; PAM sequence: GAG
gagcagtcttcatcccaggg

SEQ ID NO: 8908 - DNA, 20 bp, Artificial Sequence
  Description of Artificial Sequence: Synthetic oligonucleotide
  Target: APOC3; (+) strand; PAM type: NRG; PAM sequence: TGG
tcatcccaggggagccatga

SEQ ID NO: 8909 - DNA, 20 bp, Artificial Sequence
  Description of Artificial Sequence: Synthetic oligonucleotide
  Target: APOC3; (+) strand; PAM type: NRG; PAM sequence: GGG
catcccaggggagccatgat

SEQ ID NO: 8910 - DNA, 20 bp, Artificial Sequence
  Description of Artificial Sequence: Synthetic oligonucleotide
  Target: APOC3; (+) strand; PAM type: NRG; PAM sequence: GAG
tcccaggggagccatgatgg

SEQ ID NO: 8911 - DNA, 20 bp, Artificial Sequence
  Description of Artificial Sequence: Synthetic oligonucleotide
  Target: APOC3; (+) strand; PAM type: NRG; PAM sequence: GAG
ccaggggagccatgatggga

SEQ ID NO: 8912 - DNA, 20 bp, Artificial Sequence
  Description of Artificial Sequence: Synthetic oligonucleotide
  Target: APOC3; (+) strand; PAM type: NRG; PAM sequence: GAG
aggggagccatgatgggaga

SEQ ID NO: 8913 - DNA, 20 bp, Artificial Sequence
  Description of Artificial Sequence: Synthetic oligonucleotide
  Target: APOC3; (+) strand; PAM type: NRG; PAM sequence: AGG
ggggagccatgatgggagag

SEQ ID NO: 8914 - DNA, 20 bp, Artificial Sequence
  Description of Artificial Sequence: Synthetic oligonucleotide
  Target: APOC3; (+) strand; PAM type: NRG; PAM sequence: GGG
gggagccatgatgggagaga

SEQ ID NO: 8915 - DNA, 20 bp, Artificial Sequence
  Description of Artificial Sequence: Synthetic oligonucleotide
  Target: APOC3; (+) strand; PAM type: NRG; PAM sequence: GGG
ggagccatgatgggagagag

SEQ ID NO: 8916 - DNA, 20 bp, Artificial Sequence
  Description of Artificial Sequence: Synthetic oligonucleotide
  Target: APOC3; (+) strand; PAM type: NRG; PAM sequence: CAG
gccatgatgggagagagggg

SEQ ID NO: 8917 - DNA, 20 bp, Artificial Sequence
  Description of Artificial Sequence: Synthetic oligonucleotide
  Target: APOC3; (+) strand; PAM type: NRG; PAM sequence: CAG
gatgggagagaggggcagcg

SEQ ID NO: 8918 - DNA, 20 bp, Artificial Sequence
  Description of Artificial Sequence: Synthetic oligonucleotide
  Target: APOC3; (+) strand; PAM type: NRG; PAM sequence: AGG
atgggagagaggggcagcgc

SEQ ID NO: 8919 - DNA, 20 bp, Artificial Sequence
  Description of Artificial Sequence: Synthetic oligonucleotide
  Target: APOC3; (+) strand; PAM type: NRG; PAM sequence: TGG
gagagaggggcagcgcaggc

SEQ ID NO: 8920 - DNA, 20 bp, Artificial Sequence
  Description of Artificial Sequence: Synthetic oligonucleotide
  Target: APOC3; (+) strand; PAM type: NRG; PAM sequence: AAG
ggcagcgcaggctggccacc

SEQ ID NO: 8921 - DNA, 20 bp, Artificial Sequence
  Description of Artificial Sequence: Synthetic oligonucleotide
  Target: APOC3; (+) strand; PAM type: NRG; PAM sequence: GAG
cagcgcaggctggccaccaa

SEQ ID NO: 8922 - DNA, 20 bp, Artificial Sequence
  Description of Artificial Sequence: Synthetic oligonucleotide
  Target: APOC3; (+) strand; PAM type: NRG; PAM sequence: CGG
gccaccaagagatcccctgc

SEQ ID NO: 8923 - DNA, 20 bp, Artificial Sequence
  Description of Artificial Sequence: Synthetic oligonucleotide
  Target: APOC3; (+) strand; PAM type: NRG; PAM sequence: GGG
ccaccaagagatcccctgcc

SEQ ID NO: 8924 - DNA, 20 bp, Artificial Sequence
  Description of Artificial Sequence: Synthetic oligonucleotide
  Target: APOC3; (+) strand; PAM type: NRG; PAM sequence: GGG
caccaagagatcccctgccg

SEQ ID NO: 8925 - DNA, 20 bp, Artificial Sequence
  Description of Artificial Sequence: Synthetic oligonucleotide
  Target: APOC3; (+) strand; PAM type: NRG; PAM sequence: CAG
agagatcccctgccggggtg

SEQ ID NO: 8926 - DNA, 20 bp, Artificial Sequence
  Description of Artificial Sequence: Synthetic oligonucleotide
  Target: APOC3; (+) strand; PAM type: NRG; PAM sequence: AGG
gagatcccctgccggggtgc

SEQ ID NO: 8927 - DNA, 20 bp, Artificial Sequence
  Description of Artificial Sequence: Synthetic oligonucleotide
  Target: APOC3; (+) strand; PAM type: NRG; PAM sequence: TGG
tcccctgccggggtgcaggt

SEQ ID NO: 8928 - DNA, 20 bp, Artificial Sequence
  Description of Artificial Sequence: Synthetic oligonucleotide
  Target: APOC3; (+) strand; PAM type: NRG; PAM sequence: TGG
cggggtgcaggttggactgt

SEQ ID NO: 8929 - DNA, 20 bp, Artificial Sequence
  Description of Artificial Sequence: Synthetic oligonucleotide
  Target: APOC3; (+) strand; PAM type: NRG; PAM sequence: GAG
gtgcaggttggactgttggt

SEQ ID NO: 8930 - DNA, 20 bp, Artificial Sequence
  Description of Artificial Sequence: Synthetic oligonucleotide
  Target: APOC3; (+) strand; PAM type: NRG; PAM sequence: AGG
tgcaggttggactgttggtg

SEQ ID NO: 8931 - DNA, 20 bp, Artificial Sequence
  Description of Artificial Sequence: Synthetic oligonucleotide
  Target: APOC3; (+) strand; PAM type: NRG; PAM sequence: GGG
gcaggttggactgttggtga

SEQ ID NO: 8932 - DNA, 20 bp, Artificial Sequence
  Description of Artificial Sequence: Synthetic oligonucleotide
  Target: APOC3; (+) strand; PAM type: NRG; PAM sequence: GGG
caggttggactgttggtgag

SEQ ID NO: 8933 - DNA, 20 bp, Artificial Sequence
  Description of Artificial Sequence: Synthetic oligonucleotide
  Target: APOC3; (+) strand; PAM type: NRG; PAM sequence: CAG
ggactgttggtgaggggcca

SEQ ID NO: 8934 - DNA, 20 bp, Artificial Sequence
  Description of Artificial Sequence: Synthetic oligonucleotide
  Target: APOC3; (+) strand; PAM type: NRG; PAM sequence: AGG
gactgttggtgaggggccac

SEQ ID NO: 8935 - DNA, 20 bp, Artificial Sequence
  Description of Artificial Sequence: Synthetic oligonucleotide
  Target: APOC3; (+) strand; PAM type: NRG; PAM sequence: CAG
tgaggggccacaggtattct

SEQ ID NO: 8936 - DNA, 20 bp, Artificial Sequence
  Description of Artificial Sequence: Synthetic oligonucleotide
  Target: APOC3; (+) strand; PAM type: NRG; PAM sequence: AGG
gaggggccacaggtattctc

SEQ ID NO: 8937 - DNA, 20 bp, Artificial Sequence
  Description of Artificial Sequence: Synthetic oligonucleotide
  Target: APOC3; (+) strand; PAM type: NRG; PAM sequence: AAG
cacaggtattctcaggtacc

SEQ ID NO: 8938 - DNA, 20 bp, Artificial Sequence
  Description of Artificial Sequence: Synthetic oligonucleotide
  Target: APOC3; (+) strand; PAM type: NRG; PAM sequence: TGG
attctcaggtaccaagccct

SEQ ID NO: 8939 - DNA, 20 bp, Artificial Sequence
  Description of Artificial Sequence: Synthetic oligonucleotide
  Target: APOC3; (+) strand; PAM type: NRG; PAM sequence: AAG
ctcaggtaccaagcccttgg

SEQ ID NO: 8940 - DNA, 20 bp, Artificial Sequence
  Description of Artificial Sequence: Synthetic oligonucleotide
  Target: APOC3; (+) strand; PAM type: NRG; PAM sequence: AGG
tcaggtaccaagcccttgga

SEQ ID NO: 8941 - DNA, 20 bp, Artificial Sequence
  Description of Artificial Sequence: Synthetic oligonucleotide
  Target: APOC3; (+) strand; PAM type: NRG; PAM sequence: GAG
aggtaccaagcccttggaag

SEQ ID NO: 8942 - DNA, 20 bp, Artificial Sequence
  Description of Artificial Sequence: Synthetic oligonucleotide
  Target: APOC3; (+) strand; PAM type: NRG; PAM sequence: AAG
ccaagcccttggaaggagac

SEQ ID NO: 8943 - DNA, 20 bp, Artificial Sequence
  Description of Artificial Sequence: Synthetic oligonucleotide
  Target: APOC3; (+) strand; PAM type: NRG; PAM sequence: AGG
caagcccttggaaggagaca

SEQ ID NO: 8944 - DNA, 20 bp, Artificial Sequence
  Description of Artificial Sequence: Synthetic oligonucleotide
  Target: APOC3; (+) strand; PAM type: NRG; PAM sequence: CAG
cttggaaggagacaaggtac

SEQ ID NO: 8945 - DNA, 20 bp, Artificial Sequence
  Description of Artificial Sequence: Synthetic oligonucleotide
  Target: APOC3; (+) strand; PAM type: NRG; PAM sequence: AGG
ttggaaggagacaaggtacc

SEQ ID NO: 8946 - DNA, 20 bp, Artificial Sequence
  Description of Artificial Sequence: Synthetic oligonucleotide
  Target: APOC3; (+) strand; PAM type: NRG; PAM sequence: TGG
agacaaggtaccaggcttcc

SEQ ID NO: 8947 - DNA, 20 bp, Artificial Sequence
  Description of Artificial Sequence: Synthetic oligonucleotide
  Target: APOC3; (+) strand; PAM type: NRG; PAM sequence: GAG
acaaggtaccaggcttcctg

SEQ ID NO: 8948 - DNA, 20 bp, Artificial Sequence
  Description of Artificial Sequence: Synthetic oligonucleotide
  Target: APOC3; (+) strand; PAM type: NRG; PAM sequence: AGG
caaggtaccaggcttcctgg

SEQ ID NO: 8949 - DNA, 20 bp, Artificial Sequence
  Description of Artificial Sequence: Synthetic oligonucleotide
  Target: APOC3; (+) strand; PAM type: NRG; PAM sequence: TAG
tcctggaggtgtgctacatc

SEQ ID NO: 8950 - DNA, 20 bp, Artificial Sequence
  Description of Artificial Sequence: Synthetic oligonucleotide
  Target: APOC3; (+) strand; PAM type: NRG; PAM sequence: CAG
gaggtgtgctacatctagct

SEQ ID NO: 8951 - DNA, 20 bp, Artificial Sequence
  Description of Artificial Sequence: Synthetic oligonucleotide
  Target: APOC3; (+) strand; PAM type: NRG; PAM sequence: CAG
catctagctcagcaccctgc

SEQ ID NO: 8952 - DNA, 20 bp, Artificial Sequence
  Description of Artificial Sequence: Synthetic oligonucleotide
  Target: APOC3; (+) strand; PAM type: NRG; PAM sequence: AGG
atctagctcagcaccctgcc

SEQ ID NO: 8953 - DNA, 20 bp, Artificial Sequence
  Description of Artificial Sequence: Synthetic oligonucleotide
  Target: APOC3; (+) strand; PAM type: NRG; PAM sequence: TGG
cccacatgtcctgacctccc

SEQ ID NO: 8954 - DNA, 20 bp, Artificial Sequence
  Description of Artificial Sequence: Synthetic oligonucleotide
  Target: APOC3; (+) strand; PAM type: NRG; PAM sequence: GGG
ccacatgtcctgacctccct

SEQ ID NO: 8955 - DNA, 20 bp, Artificial Sequence
  Description of Artificial Sequence: Synthetic oligonucleotide
  Target: APOC3; (+) strand; PAM type: NRG; PAM sequence: CGG
tccctgggtccgttgccatg

SEQ ID NO: 8956 - DNA, 20 bp, Artificial Sequence
  Description of Artificial Sequence: Synthetic oligonucleotide
  Target: APOC3; (+) strand; PAM type: NRG; PAM sequence: GGG
ccctgggtccgttgccatgc

SEQ ID NO: 8957 - DNA, 20 bp, Artificial Sequence
  Description of Artificial Sequence: Synthetic oligonucleotide
  Target: APOC3; (+) strand; PAM type: NRG; PAM sequence: GAG
ctgggtccgttgccatgcgg

SEQ ID NO: 8958 - DNA, 20 bp, Artificial Sequence
  Description of Artificial Sequence: Synthetic oligonucleotide
  Target: APOC3; (+) strand; PAM type: NRG; PAM sequence: GAG
gggtccgttgccatgcggga

SEQ ID NO: 8959 - DNA, 20 bp, Artificial Sequence
  Description of Artificial Sequence: Synthetic oligonucleotide
  Target: APOC3; (+) strand; PAM type: NRG; PAM sequence: GAG
gtccgttgccatgcgggaga

SEQ ID NO: 8960 - DNA, 20 bp, Artificial Sequence
  Description of Artificial Sequence: Synthetic oligonucleotide
  Target: APOC3; (+) strand; PAM type: NRG; PAM sequence: GAG
ccgttgccatgcgggagaga

SEQ ID NO: 8961 - DNA, 20 bp, Artificial Sequence
  Description of Artificial Sequence: Synthetic oligonucleotide
  Target: APOC3; (+) strand; PAM type: NRG; PAM sequence: AGG
cgttgccatgcgggagagag

SEQ ID NO: 8962 - DNA, 20 bp, Artificial Sequence
  Description of Artificial Sequence: Synthetic oligonucleotide
  Target: APOC3; (+) strand; PAM type: NRG; PAM sequence: CAG
gccatgcgggagagagaggc

SEQ ID NO: 8963 - DNA, 20 bp, Artificial Sequence
  Description of Artificial Sequence: Synthetic oligonucleotide
  Target: APOC3; (+) strand; PAM type: NRG; PAM sequence: AGG
ccatgcgggagagagaggcc

SEQ ID NO: 8964 - DNA, 20 bp, Artificial Sequence
  Description of Artificial Sequence: Synthetic oligonucleotide
  Target: APOC3; (+) strand; PAM type: NRG; PAM sequence: CAG
agagagaggccaggctcctc

SEQ ID NO: 8965 - DNA, 20 bp, Artificial Sequence
  Description of Artificial Sequence: Synthetic oligonucleotide
  Target: APOC3; (+) strand; PAM type: NRG; PAM sequence: CAG
aggctcctccagaccctctg

SEQ ID NO: 8966 - DNA, 20 bp, Artificial Sequence
  Description of Artificial Sequence: Synthetic oligonucleotide
  Target: APOC3; (+) strand; PAM type: NRG; PAM sequence: GAG
gctcctccagaccctctgca

SEQ ID NO: 8967 - DNA, 20 bp, Artificial Sequence
  Description of Artificial Sequence: Synthetic oligonucleotide
  Target: APOC3; (+) strand; PAM type: NRG; PAM sequence: TGG
ctccagaccctctgcagaga

SEQ ID NO: 8968 - DNA, 20 bp, Artificial Sequence
  Description of Artificial Sequence: Synthetic oligonucleotide
  Target: APOC3; (+) strand; PAM type: NRG; PAM sequence: AAG
agaccctctgcagagatgga

SEQ ID NO: 8969 - DNA, 20 bp, Artificial Sequence
  Description of Artificial Sequence: Synthetic oligonucleotide
  Target: APOC3; (+) strand; PAM type: NRG; PAM sequence: AGG
gaccctctgcagagatggaa

SEQ ID NO: 8970 - DNA, 20 bp, Artificial Sequence
  Description of Artificial Sequence: Synthetic oligonucleotide
  Target: APOC3; (+) strand; PAM type: NRG; PAM sequence: TGG
tctgcagagatggaaaggct

SEQ ID NO: 8971 - DNA, 20 bp, Artificial Sequence
  Description of Artificial Sequence: Synthetic oligonucleotide
  Target: APOC3; (+) strand; PAM type: NRG; PAM sequence: GAG
tgcagagatggaaaggcttg

SEQ ID NO: 8972 - DNA, 20 bp, Artificial Sequence
  Description of Artificial Sequence: Synthetic oligonucleotide
  Target: APOC3; (+) strand; PAM type: NRG; PAM sequence: AGG
gcagagatggaaaggcttgg

SEQ ID NO: 8973 - DNA, 20 bp, Artificial Sequence
  Description of Artificial Sequence: Synthetic oligonucleotide
  Target: APOC3; (+) strand; PAM type: NRG; PAM sequence: GGG
cagagatggaaaggcttgga

SEQ ID NO: 8974 - DNA, 20 bp, Artificial Sequence
  Description of Artificial Sequence: Synthetic oligonucleotide
  Target: APOC3; (+) strand; PAM type: NRG; PAM sequence: TGG
atggaaaggcttggagggtc

SEQ ID NO: 8975 - DNA, 20 bp, Artificial Sequence
  Description of Artificial Sequence: Synthetic oligonucleotide
  Target: APOC3; (+) strand; PAM type: NRG; PAM sequence: GGG
tggaaaggcttggagggtct

SEQ ID NO: 8976 - DNA, 20 bp, Artificial Sequence
  Description of Artificial Sequence: Synthetic oligonucleotide
  Target: APOC3; (+) strand; PAM type: NRG; PAM sequence: GGG
ggaaaggcttggagggtctg

SEQ ID NO: 8977 - DNA, 20 bp, Artificial Sequence
  Description of Artificial Sequence: Synthetic oligonucleotide
  Target: APOC3; (+) strand; PAM type: NRG; PAM sequence: CGG
gcttggagggtctggggcca

SEQ ID NO: 8978 - DNA, 20 bp, Artificial Sequence
  Description of Artificial Sequence: Synthetic oligonucleotide
  Target: APOC3; (+) strand; PAM type: NRG; PAM sequence: GGG
cttggagggtctggggccac

SEQ ID NO: 8979 - DNA, 20 bp, Artificial Sequence
  Description of Artificial Sequence: Synthetic oligonucleotide
  Target: APOC3; (+) strand; PAM type: NRG; PAM sequence: CAG
ctggggccacgggaccccgc

SEQ ID NO: 8980 - DNA, 20 bp, Artificial Sequence
  Description of Artificial Sequence: Synthetic oligonucleotide
  Target: APOC3; (+) strand; PAM type: NRG; PAM sequence: TAG
gggaccccgccagcccattc

SEQ ID NO: 8981 - DNA, 20 bp, Artificial Sequence
  Description of Artificial Sequence: Synthetic oligonucleotide
  Target: APOC3; (+) strand; PAM type: NRG; PAM sequence: CGG
ccagcccattctagcacacc

SEQ ID NO: 8982 - DNA, 20 bp, Artificial Sequence
  Description of Artificial Sequence: Synthetic oligonucleotide
  Target: APOC3; (+) strand; PAM type: NRG; PAM sequence: GGG
cagcccattctagcacaccc

SEQ ID NO: 8983 - DNA, 20 bp, Artificial Sequence
  Description of Artificial Sequence: Synthetic oligonucleotide
  Target: APOC3; (+) strand; PAM type: NRG; PAM sequence: TAG
ttctagcacacccgggccca

SEQ ID NO: 8984 - DNA, 20 bp, Artificial Sequence
  Description of Artificial Sequence: Synthetic oligonucleotide
  Target: APOC3; (+) strand; PAM type: NRG; PAM sequence: TGG
ccttgttgcctgcccctgcc

SEQ ID NO: 8985 - DNA, 20 bp, Artificial Sequence
  Description of Artificial Sequence: Synthetic oligonucleotide
  Target: APOC3; (+) strand; PAM type: NRG; PAM sequence: TGG
tgcctgcccctgcctggatc

SEQ ID NO: 8986 - DNA, 20 bp, Artificial Sequence
  Description of Artificial Sequence: Synthetic oligonucleotide
  Target: APOC3; (+) strand; PAM type: NRG; PAM sequence: GGG
gcctgcccctgcctggatct

SEQ ID NO: 8987 - DNA, 20 bp, Artificial Sequence
  Description of Artificial Sequence: Synthetic oligonucleotide
  Target: APOC3; (+) strand; PAM type: NRG; PAM sequence: TGG
ccccactgtgcctttgcctc

SEQ ID NO: 8988 - DNA, 20 bp, Artificial Sequence
  Description of Artificial Sequence: Synthetic oligonucleotide
  Target: APOC3; (+) strand; PAM type: NRG; PAM sequence: GGG
cccactgtgcctttgcctct

SEQ ID NO: 8989 - DNA, 20 bp, Artificial Sequence
  Description of Artificial Sequence: Synthetic oligonucleotide
  Target: APOC3; (+) strand; PAM type: NRG; PAM sequence: GGG
ccactgtgcctttgcctctg

SEQ ID NO: 8990 - DNA, 20 bp, Artificial Sequence
  Description of Artificial Sequence: Synthetic oligonucleotide
  Target: APOC3; (+) strand; PAM type: NRG; PAM sequence: TGG
tgcctttgcctctggggcta

SEQ ID NO: 8991 - DNA, 20 bp, Artificial Sequence
  Description of Artificial Sequence: Synthetic oligonucleotide
  Target: APOC3; (+) strand; PAM type: NRG; PAM sequence: GAG
cctttgcctctggggctatg

SEQ ID NO: 8992 - DNA, 20 bp, Artificial Sequence
  Description of Artificial Sequence: Synthetic oligonucleotide
  Target: APOC3; (+) strand; PAM type: NRG; PAM sequence: CAG
ttgcctctggggctatggag

SEQ ID NO: 8993 - DNA, 20 bp, Artificial Sequence
  Description of Artificial Sequence: Synthetic oligonucleotide
  Target: APOC3; (+) strand; PAM type: NRG; PAM sequence: AGG
tgcctctggggctatggagc

SEQ ID NO: 8994 - DNA, 20 bp, Artificial Sequence
  Description of Artificial Sequence: Synthetic oligonucleotide
  Target: APOC3; (+) strand; PAM type: NRG; PAM sequence: CAG
tggggctatggagcaggccg

SEQ ID NO: 8995 - DNA, 20 bp, Artificial Sequence
  Description of Artificial Sequence: Synthetic oligonucleotide
  Target: APOC3; (+) strand; PAM type: NRG; PAM sequence: CAG
ggctatggagcaggccgcag

SEQ ID NO: 8996 - DNA, 20 bp, Artificial Sequence
  Description of Artificial Sequence: Synthetic oligonucleotide
  Target: APOC3; (+) strand; PAM type: NRG; PAM sequence: AAG
tatggagcaggccgcagcag

SEQ ID NO: 8997 - DNA, 20 bp, Artificial Sequence
  Description of Artificial Sequence: Synthetic oligonucleotide
  Target: APOC3; (+) strand; PAM type: NRG; PAM sequence: GAG
tggagcaggccgcagcagaa

SEQ ID NO: 8998 - DNA, 20 bp, Artificial Sequence
  Description of Artificial Sequence: Synthetic oligonucleotide
  Target: APOC3; (+) strand; PAM type: NRG; PAM sequence: AGG
ggagcaggccgcagcagaag

SEQ ID NO: 8999 - DNA, 20 bp, Artificial Sequence
  Description of Artificial Sequence: Synthetic oligonucleotide
  Target: APOC3; (+) strand; PAM type: NRG; PAM sequence: AAG
caggccgcagcagaagagga

SEQ ID NO: 9000 - DNA, 20 bp, Artificial Sequence
  Description of Artificial Sequence: Synthetic oligonucleotide
  Target: APOC3; (+) strand; PAM type: NRG; PAM sequence: AGG
aggccgcagcagaagaggaa

SEQ ID NO: 9001 - DNA, 20 bp, Artificial Sequence
  Description of Artificial Sequence: Synthetic oligonucleotide
  Target: APOC3; (+) strand; PAM type: NRG; PAM sequence: GGG
ggccgcagcagaagaggaaa

SEQ ID NO: 9002 - DNA, 20 bp, Artificial Sequence
  Description of Artificial Sequence: Synthetic oligonucleotide
  Target: APOC3; (+) strand; PAM type: NRG; PAM sequence: CAG
atccccaataccaaatcctc

SEQ ID NO: 9003 - DNA, 20 bp, Artificial Sequence
  Description of Artificial Sequence: Synthetic oligonucleotide
  Target: APOC3; (+) strand; PAM type: NRG; PAM sequence: AAG
caccttctaccccaccacca

SEQ ID NO: 9004 - DNA, 20 bp, Artificial Sequence
  Description of Artificial Sequence: Synthetic oligonucleotide
  Target: APOC3; (+) strand; PAM type: NRG; PAM sequence: CAG
taccccaccaccaaagtctg

SEQ ID NO: 9005 - DNA, 20 bp, Artificial Sequence
  Description of Artificial Sequence: Synthetic oligonucleotide
  Target: APOC3; (+) strand; PAM type: NRG; PAM sequence: AGG
accccaccaccaaagtctgc

SEQ ID NO: 9006 - DNA, 20 bp, Artificial Sequence
  Description of Artificial Sequence: Synthetic oligonucleotide
  Target: APOC3; (+) strand; PAM type: NRG; PAM sequence: GAG
cccaccaccaaagtctgcag

SEQ ID NO: 9007 - DNA, 20 bp, Artificial Sequence
  Description of Artificial Sequence: Synthetic oligonucleotide
  Target: APOC3; (+) strand; PAM type: NRG; PAM sequence: GAG
ccaaagtctgcaggagactt

SEQ ID NO: 9008 - DNA, 20 bp, Artificial Sequence
  Description of Artificial Sequence: Synthetic oligonucleotide
  Target: APOC3; (+) strand; PAM type: NRG; PAM sequence: CAG
agtctgcaggagacttgaga

SEQ ID NO: 9009 - DNA, 20 bp, Artificial Sequence
  Description of Artificial Sequence: Synthetic oligonucleotide
  Target: APOC3; (+) strand; PAM type: NRG; PAM sequence: AGG
gtctgcaggagacttgagac

SEQ ID NO: 9010 - DNA, 20 bp, Artificial Sequence
  Description of Artificial Sequence: Synthetic oligonucleotide
  Target: APOC3; (+) strand; PAM type: NRG; PAM sequence: TGG
gacttgagacaggtttgttc

SEQ ID NO: 9011 - DNA, 20 bp, Artificial Sequence
  Description of Artificial Sequence: Synthetic oligonucleotide
  Target: APOC3; (+) strand; PAM type: NRG; PAM sequence: GGG
acttgagacaggtttgttct

SEQ ID NO: 9012 - DNA, 20 bp, Artificial Sequence
  Description of Artificial Sequence: Synthetic oligonucleotide
  Target: APOC3; (+) strand; PAM type: NRG; PAM sequence: TAG
gcgtgtgactgatgcctcta

SEQ ID NO: 9013 - DNA, 20 bp, Artificial Sequence
  Description of Artificial Sequence: Synthetic oligonucleotide
  Target: APOC3; (+) strand; PAM type: NRG; PAM sequence: AGG
cgtgtgactgatgcctctat

SEQ ID NO: 9014 - DNA, 20 bp, Artificial Sequence
  Description of Artificial Sequence: Synthetic oligonucleotide
  Target: APOC3; (+) strand; PAM type: NRG; PAM sequence: GGG
gtgtgactgatgcctctata

SEQ ID NO: 9015 - DNA, 20 bp, Artificial Sequence
  Description of Artificial Sequence: Synthetic oligonucleotide
  Target: APOC3; (+) strand; PAM type: NRG; PAM sequence: GGG
tgtgactgatgcctctatag

SEQ ID NO: 9016 - DNA, 20 bp, Artificial Sequence
  Description of Artificial Sequence: Synthetic oligonucleotide
  Target: APOC3; (+) strand; PAM type: NRG; PAM sequence: CAG
tgatgcctctataggggtct

SEQ ID NO: 9017 - DNA, 20 bp, Artificial Sequence
  Description of Artificial Sequence: Synthetic oligonucleotide
  Target: APOC3; (+) strand; PAM type: NRG; PAM sequence: AAG
tataggggtctcagtgctct

SEQ ID NO: 9018 - DNA, 20 bp, Artificial Sequence
  Description of Artificial Sequence: Synthetic oligonucleotide
  Target: APOC3; (+) strand; PAM type: NRG; PAM sequence: TGG
tctcagtgctctaagccgtc

SEQ ID NO: 9019 - DNA, 20 bp, Artificial Sequence
  Description of Artificial Sequence: Synthetic oligonucleotide
  Target: APOC3; (+) strand; PAM type: NRG; PAM sequence: TGG
taagccgtctggtatttgcc

SEQ ID NO: 9020 - DNA, 20 bp, Artificial Sequence
  Description of Artificial Sequence: Synthetic oligonucleotide
  Target: APOC3; (+) strand; PAM type: NRG; PAM sequence: GGG
aagccgtctggtatttgcct

SEQ ID NO: 9021 - DNA, 20 bp, Artificial Sequence
  Description of Artificial Sequence: Synthetic oligonucleotide
  Target: APOC3; (+) strand; PAM type: NRG; PAM sequence: GGG
agccgtctggtatttgcctg

SEQ ID NO: 9022 - DNA, 20 bp, Artificial Sequence
  Description of Artificial Sequence: Synthetic oligonucleotide
  Target: APOC3; (+) strand; PAM type: NRG; PAM sequence: AAG
gtatttgcctggggtgtgtg

SEQ ID NO: 9023 - DNA, 20 bp, Artificial Sequence
  Description of Artificial Sequence: Synthetic oligonucleotide
  Target: APOC3; (+) strand; PAM type: NRG; PAM sequence: TGG
gcctggggtgtgtgaagacc

SEQ ID NO: 9024 - DNA, 20 bp, Artificial Sequence
  Description of Artificial Sequence: Synthetic oligonucleotide
  Target: APOC3; (+) strand; PAM type: NRG; PAM sequence: AAG
ggtgtgtgaagacctggatt

SEQ ID NO: 9025 - DNA, 20 bp, Artificial Sequence
  Description of Artificial Sequence: Synthetic oligonucleotide
  Target: APOC3; (+) strand; PAM type: NRG; PAM sequence: AGG
gtgtgtgaagacctggatta

SEQ ID NO: 9026 - DNA, 20 bp, Artificial Sequence
  Description of Artificial Sequence: Synthetic oligonucleotide
  Target: APOC3; (+) strand; PAM type: NRG; PAM sequence: CAG
aagacctggattaaggttcc

SEQ ID NO: 9027 - DNA, 20 bp, Artificial Sequence
  Description of Artificial Sequence: Synthetic oligonucleotide
  Target: APOC3; (+) strand; PAM type: NRG; PAM sequence: TGG
gttcccagccttactactaa

SEQ ID NO: 9028 - DNA, 20 bp, Artificial Sequence
  Description of Artificial Sequence: Synthetic oligonucleotide
  Target: APOC3; (+) strand; PAM type: NRG; PAM sequence: GGG
ttcccagccttactactaat

SEQ ID NO: 9029 - DNA, 20 bp, Artificial Sequence
  Description of Artificial Sequence: Synthetic oligonucleotide
  Target: APOC3; (+) strand; PAM type: NRG; PAM sequence: TGG
ctactaatgggctgtgcact

SEQ ID NO: 9030 - DNA, 20 bp, Artificial Sequence
  Description of Artificial Sequence: Synthetic oligonucleotide
  Target: APOC3; (+) strand; PAM type: NRG; PAM sequence: GAG
actaatgggctgtgcacttg

SEQ ID NO: 9031 - DNA, 20 bp, Artificial Sequence
  Description of Artificial Sequence: Synthetic oligonucleotide
  Target: APOC3; (+) strand; PAM type: NRG; PAM sequence: TAG
ggctgtgcacttggagccct

SEQ ID NO: 9032 - DNA, 20 bp, Artificial Sequence
  Description of Artificial Sequence: Synthetic oligonucleotide
  Target: APOC3; (+) strand; PAM type: NRG; PAM sequence: GAG
ctgtgcacttggagccctta

SEQ ID NO: 9033 - DNA, 20 bp, Artificial Sequence
  Description of Artificial Sequence: Synthetic oligonucleotide
  Target: APOC3; (+) strand; PAM type: NRG; PAM sequence: TAG
acttggagcccttagagcct

SEQ ID NO: 9034 - DNA, 20 bp, Artificial Sequence
  Description of Artificial Sequence: Synthetic oligonucleotide
  Target: APOC3; (+) strand; PAM type: NRG; PAM sequence: AGG
cttggagcccttagagcctt

SEQ ID NO: 9035 - DNA, 20 bp, Artificial Sequence
  Description of Artificial Sequence: Synthetic oligonucleotide
  Target: APOC3; (+) strand; PAM type: NRG; PAM sequence: TGG
taggtttctaacctataaaa

SEQ ID NO: 9036 - DNA, 20 bp, Artificial Sequence
  Description of Artificial Sequence: Synthetic oligonucleotide
  Target: APOC3; (+) strand; PAM type: NRG; PAM sequence: CAG
tggacttaacgtctacttca

SEQ ID NO: 9037 - DNA, 20 bp, Artificial Sequence
  Description of Artificial Sequence: Synthetic oligonucleotide
  Target: APOC3; (+) strand; PAM type: NRG; PAM sequence: AGG
ggacttaacgtctacttcac

SEQ ID NO: 9038 - DNA, 20 bp, Artificial Sequence
  Description of Artificial Sequence: Synthetic oligonucleotide
  Target: APOC3; (+) strand; PAM type: NRG; PAM sequence: GGG
gacttaacgtctacttcaca

SEQ ID NO: 9039 - DNA, 20 bp, Artificial Sequence
  Description of Artificial Sequence: Synthetic oligonucleotide
  Target: APOC3; (+) strand; PAM type: NRG; PAM sequence: CAG
gggttctatttgcattttaa

SEQ ID NO: 9040 - DNA, 20 bp, Artificial Sequence
  Description of Artificial Sequence: Synthetic oligonucleotide
  Target: APOC3; (+) strand; PAM type: NRG; PAM sequence: AAG
ttgcattttaacagaaaaca

SEQ ID NO: 9041 - DNA, 20 bp, Artificial Sequence
  Description of Artificial Sequence: Synthetic oligonucleotide
  Target: APOC3; (+) strand; PAM type: NRG; PAM sequence: AAG
ttaacagaaaacaaagtctt

SEQ ID NO: 9042 - DNA, 20 bp, Artificial Sequence
  Description of Artificial Sequence: Synthetic oligonucleotide
  Target: APOC3; (+) strand; PAM type: NRG; PAM sequence: AAG
gaaaacaaagtcttaagtca

SEQ ID NO: 9043 - DNA, 20 bp, Artificial Sequence
  Description of Artificial Sequence: Synthetic oligonucleotide
  Target: APOC3; (+) strand; PAM type: NRG; PAM sequence: AGG
aaaacaaagtcttaagtcaa

SEQ ID NO: 9044 - DNA, 20 bp, Artificial Sequence
  Description of Artificial Sequence: Synthetic oligonucleotide
  Target: APOC3; (+) strand; PAM type: NRG; PAM sequence: TAG
ctctctctctctctcttttt

SEQ ID NO: 9045 - DNA, 20 bp, Artificial Sequence
  Description of Artificial Sequence: Synthetic oligonucleotide
  Target: APOC3; (+) strand; PAM type: NRG; PAM sequence: AAG
ctctctctcttttttagacc

SEQ ID NO: 9046 - DNA, 20 bp, Artificial Sequence
  Description of Artificial Sequence: Synthetic oligonucleotide
  Target: APOC3; (+) strand; PAM type: NRG; PAM sequence: TAG
tctcttttttagaccaagtc

SEQ ID NO: 9047 - DNA, 20 bp, Artificial Sequence
  Description of Artificial Sequence: Synthetic oligonucleotide
  Target: APOC3; (+) strand; PAM type: NRG; PAM sequence: TGG
accaagtctagctctgtcac

SEQ ID NO: 9048 - DNA, 20 bp, Artificial Sequence
  Description of Artificial Sequence: Synthetic oligonucleotide
  Target: APOC3; (+) strand; PAM type: NRG; PAM sequence: GAG
caagtctagctctgtcactg

SEQ ID NO: 9049 - DNA, 20 bp, Artificial Sequence
  Description of Artificial Sequence: Synthetic oligonucleotide
  Target: APOC3; (+) strand; PAM type: NRG; PAM sequence: TGG
gctctgtcactggagtgcaa

SEQ ID NO: 9050 - DNA, 20 bp, Artificial Sequence
  Description of Artificial Sequence: Synthetic oligonucleotide
  Target: APOC3; (+) strand; PAM type: NRG; PAM sequence: CGG
ctcactgcaacctccacctc

SEQ ID NO: 9051 - DNA, 20 bp, Artificial Sequence
  Description of Artificial Sequence: Synthetic oligonucleotide
  Target: APOC3; (+) strand; PAM type: NRG; PAM sequence: GGG
tcactgcaacctccacctcc

SEQ ID NO: 9052 - DNA, 20 bp, Artificial Sequence
  Description of Artificial Sequence: Synthetic oligonucleotide
  Target: APOC3; (+) strand; PAM type: NRG; PAM sequence: GGG
cactgcaacctccacctccg

SEQ ID NO: 9053 - DNA, 20 bp, Artificial Sequence
  Description of Artificial Sequence: Synthetic oligonucleotide
  Target: APOC3; (+) strand; PAM type: NRG; PAM sequence: AAG
aacctccacctccggggttc

SEQ ID NO: 9054 - DNA, 20 bp, Artificial Sequence
  Description of Artificial Sequence: Synthetic oligonucleotide
  Target: APOC3; (+) strand; PAM type: NRG; PAM sequence: CAG
ttcaagcaattctcgtgcct

SEQ ID NO: 9055 - DNA, 20 bp, Artificial Sequence
  Description of Artificial Sequence: Synthetic oligonucleotide
  Target: APOC3; (+) strand; PAM type: NRG; PAM sequence: GAG
ttctcgtgcctcagcctcct

SEQ ID NO: 9056 - DNA, 20 bp, Artificial Sequence
  Description of Artificial Sequence: Synthetic oligonucleotide
  Target: APOC3; (+) strand; PAM type: NRG; PAM sequence: TAG
tcgtgcctcagcctcctgag

SEQ ID NO: 9057 - DNA, 20 bp, Artificial Sequence
  Description of Artificial Sequence: Synthetic oligonucleotide
  Target: APOC3; (+) strand; PAM type: NRG; PAM sequence: TGG
gcctcagcctcctgagtagc

SEQ ID NO: 9058 - DNA, 20 bp, Artificial Sequence
  Description of Artificial Sequence: Synthetic oligonucleotide
  Target: APOC3; (+) strand; PAM type: NRG; PAM sequence: GGG
cctcagcctcctgagtagct

SEQ ID NO: 9059 - DNA, 20 bp, Artificial Sequence
  Description of Artificial Sequence: Synthetic oligonucleotide
  Target: APOC3; (+) strand; PAM type: NRG; PAM sequence: CAG
ctcctgagtagctgggacta

SEQ ID NO: 9060 - DNA, 20 bp, Artificial Sequence
  Description of Artificial Sequence: Synthetic oligonucleotide
  Target: APOC3; (+) strand; PAM type: NRG; PAM sequence: AGG
tcctgagtagctgggactac

SEQ ID NO: 9061 - DNA, 20 bp, Artificial Sequence
  Description of Artificial Sequence: Synthetic oligonucleotide
  Target: APOC3; (+) strand; PAM type: NRG; PAM sequence: CGG
caggcgtgcatcaccatgct

SEQ ID NO: 9062 - DNA, 20 bp, Artificial Sequence
  Description of Artificial Sequence: Synthetic oligonucleotide
  Target: APOC3; (+) strand; PAM type: NRG; PAM sequence: TAG
cggctaattttttgtatttt

SEQ ID NO: 9063 - DNA, 20 bp, Artificial Sequence
  Description of Artificial Sequence: Synthetic oligonucleotide
  Target: APOC3; (+) strand; PAM type: NRG; PAM sequence: TAG
ctaattttttgtatttttag

SEQ ID NO: 9064 - DNA, 20 bp, Artificial Sequence
  Description of Artificial Sequence: Synthetic oligonucleotide
  Target: APOC3; (+) strand; PAM type: NRG; PAM sequence: GAG
aattttttgtatttttagta

SEQ ID NO: 9065 - DNA, 20 bp, Artificial Sequence
  Description of Artificial Sequence: Synthetic oligonucleotide
  Target: APOC3; (+) strand; PAM type: NRG; PAM sequence: TGG
tttgtatttttagtagagac

SEQ ID NO: 9066 - DNA, 20 bp, Artificial Sequence
  Description of Artificial Sequence: Synthetic oligonucleotide
  Target: APOC3; (+) strand; PAM type: NRG; PAM sequence: GGG
ttgtatttttagtagagact

SEQ ID NO: 9067 - DNA, 20 bp, Artificial Sequence
  Description of Artificial Sequence: Synthetic oligonucleotide
  Target: APOC3; (+) strand; PAM type: NRG; PAM sequence: CAG
ctgggtttcgccatgttgcc

SEQ ID NO: 9068 - DNA, 20 bp, Artificial Sequence
  Description of Artificial Sequence: Synthetic oligonucleotide
  Target: APOC3; (+) strand; PAM type: NRG; PAM sequence: AGG
tgggtttcgccatgttgccc

SEQ ID NO: 9069 - DNA, 20 bp, Artificial Sequence
  Description of Artificial Sequence: Synthetic oligonucleotide
  Target: APOC3; (+) strand; PAM type: NRG; PAM sequence: TGG
tttcgccatgttgcccaggc

SEQ ID NO: 9070 - DNA, 20 bp, Artificial Sequence
  Description of Artificial Sequence: Synthetic oligonucleotide
  Target: APOC3; (+) strand; PAM type: NRG; PAM sequence: TGG
ccaggctggtctcgaactcc

SEQ ID NO: 9071 - DNA, 20 bp, Artificial Sequence
  Description of Artificial Sequence: Synthetic oligonucleotide
  Target: APOC3; (+) strand; PAM type: NRG; PAM sequence: CAG
tggtctcgaactcctggcct

SEQ ID NO: 9072 - DNA, 20 bp, Artificial Sequence
  Description of Artificial Sequence: Synthetic oligonucleotide
  Target: APOC3; (+) strand; PAM type: NRG; PAM sequence: CAG
cctcagatatccgtccgtcc

SEQ ID NO: 9073 - DNA, 20 bp, Artificial Sequence
  Description of Artificial Sequence: Synthetic oligonucleotide
  Target: APOC3; (+) strand; PAM type: NRG; PAM sequence: AAG
ccgtccgtcccagcctccca

SEQ ID NO: 9074 - DNA, 20 bp, Artificial Sequence
  Description of Artificial Sequence: Synthetic oligonucleotide
  Target: APOC3; (+) strand; PAM type: NRG; PAM sequence: TGG
gtcccagcctcccaaagtgc

SEQ ID NO: 9075 - DNA, 20 bp, Artificial Sequence
  Description of Artificial Sequence: Synthetic oligonucleotide
  Target: APOC3; (+) strand; PAM type: NRG; PAM sequence: GGG
tcccagcctcccaaagtgct

SEQ ID NO: 9076 - DNA, 20 bp, Artificial Sequence
  Description of Artificial Sequence: Synthetic oligonucleotide
  Target: APOC3; (+) strand; PAM type: NRG; PAM sequence: CAG
ctcccaaagtgctgggatta

SEQ ID NO: 9077 - DNA, 20 bp, Artificial Sequence
  Description of Artificial Sequence: Synthetic oligonucleotide
  Target: APOC3; (+) strand; PAM type: NRG; PAM sequence: AGG
tcccaaagtgctgggattac

SEQ ID NO: 9078 - DNA, 20 bp, Artificial Sequence
  Description of Artificial Sequence: Synthetic oligonucleotide
  Target: APOC3; (+) strand; PAM type: NRG; PAM sequence: GAG
agtgctgggattacaggcat

SEQ ID NO: 9079 - DNA, 20 bp, Artificial Sequence
  Description of Artificial Sequence: Synthetic oligonucleotide
  Target: APOC3; (+) strand; PAM type: NRG; PAM sequence: CAG
caggcatgagccactgtgcc

SEQ ID NO: 9080 - DNA, 20 bp, Artificial Sequence
  Description of Artificial Sequence: Synthetic oligonucleotide
  Target: APOC3; (+) strand; PAM type: NRG; PAM sequence: CAG
catgagccactgtgcccagc

SEQ ID NO: 9081 - DNA, 20 bp, Artificial Sequence
  Description of Artificial Sequence: Synthetic oligonucleotide
  Target: APOC3; (+) strand; PAM type: NRG; PAM sequence: AGG
atgagccactgtgcccagcc

SEQ ID NO: 9082 - DNA, 20 bp, Artificial Sequence
  Description of Artificial Sequence: Synthetic oligonucleotide
  Target: APOC3; (+) strand; PAM type: NRG; PAM sequence: TGG
ccactgtgcccagccaggaa

SEQ ID NO: 9083 - DNA, 20 bp, Artificial Sequence
  Description of Artificial Sequence: Synthetic oligonucleotide
  Target: APOC3; (+) strand; PAM type: NRG; PAM sequence: TAG
agccaggaatggatcgctaa

SEQ ID NO: 9084 - DNA, 20 bp, Artificial Sequence
  Description of Artificial Sequence: Synthetic oligonucleotide
  Target: APOC3; (+) strand; PAM type: NRG; PAM sequence: GAG
ccaggaatggatcgctaata

SEQ ID NO: 9085 - DNA, 20 bp, Artificial Sequence
  Description of Artificial Sequence: Synthetic oligonucleotide
  Target: APOC3; (+) strand; PAM type: NRG; PAM sequence: AGG
caggaatggatcgctaatag

SEQ ID NO: 9086 - DNA, 20 bp, Artificial Sequence
  Description of Artificial Sequence: Synthetic oligonucleotide
  Target: APOC3; (+) strand; PAM type: NRG; PAM sequence: AAG
atcgctaatagaggaattcc

SEQ ID NO: 9087 - DNA, 20 bp, Artificial Sequence
  Description of Artificial Sequence: Synthetic oligonucleotide
  Target: APOC3; (+) strand; PAM type: NRG; PAM sequence: AAG
ccaagtctcacccaccgata

SEQ ID NO: 9088 - DNA, 20 bp, Artificial Sequence
  Description of Artificial Sequence: Synthetic oligonucleotide
  Target: APOC3; (+) strand; PAM type: NRG; PAM sequence: GAG
acccaccgataaagaattct

SEQ ID NO: 9089 - DNA, 20 bp, Artificial Sequence
  Description of Artificial Sequence: Synthetic oligonucleotide
  Target: APOC3; (+) strand; PAM type: NRG; PAM sequence: AGG
cccaccgataaagaattctg

SEQ ID NO: 9090 - DNA, 20 bp, Artificial Sequence
  Description of Artificial Sequence: Synthetic oligonucleotide
  Target: APOC3; (+) strand; PAM type: NRG; PAM sequence: GGG
ccaccgataaagaattctga

SEQ ID NO: 9091 - DNA, 20 bp, Artificial Sequence
  Description of Artificial Sequence: Synthetic oligonucleotide
  Target: APOC3; (+) strand; PAM type: NRG; PAM sequence: CAG
ccgataaagaattctgaggg

SEQ ID NO: 9092 - DNA, 20 bp, Artificial Sequence
  Description of Artificial Sequence: Synthetic oligonucleotide
  Target: APOC3; (+) strand; PAM type: NRG; PAM sequence: GAG
gataaagaattctgagggca

SEQ ID NO: 9093 - DNA, 20 bp, Artificial Sequence
  Description of Artificial Sequence: Synthetic oligonucleotide
  Target: APOC3; (+) strand; PAM type: NRG; PAM sequence: CGG
aagaattctgagggcagagc

SEQ ID NO: 9094 - DNA, 20 bp, Artificial Sequence
  Description of Artificial Sequence: Synthetic oligonucleotide
  Target: APOC3; (+) strand; PAM type: NRG; PAM sequence: GGG
agaattctgagggcagagcc

SEQ ID NO: 9095 - DNA, 20 bp, Artificial Sequence
  Description of Artificial Sequence: Synthetic oligonucleotide
  Target: APOC3; (+) strand; PAM type: NRG; PAM sequence: CAG
gcagagccgggccactttct

SEQ ID NO: 9096 - DNA, 20 bp, Artificial Sequence
  Description of Artificial Sequence: Synthetic oligonucleotide
  Target: APOC3; (+) strand; PAM type: NRG; PAM sequence: AGG
cagagccgggccactttctc

SEQ ID NO: 9097 - DNA, 20 bp, Artificial Sequence
  Description of Artificial Sequence: Synthetic oligonucleotide
  Target: APOC3; (+) strand; PAM type: NRG; PAM sequence: TGG
aggcctctgatttcatactg

SEQ ID NO: 9098 - DNA, 20 bp, Artificial Sequence
  Description of Artificial Sequence: Synthetic oligonucleotide
  Target: APOC3; (+) strand; PAM type: NRG; PAM sequence: TAG
ctgatttcatactgtggtgt

SEQ ID NO: 9099 - DNA, 20 bp, Artificial Sequence
  Description of Artificial Sequence: Synthetic oligonucleotide
  Target: APOC3; (+) strand; PAM type: NRG; PAM sequence: GAG
ctgtggtgttagttacttct

SEQ ID NO: 9100 - DNA, 20 bp, Artificial Sequence
  Description of Artificial Sequence: Synthetic oligonucleotide
  Target: APOC3; (+) strand; PAM type: NRG; PAM sequence: GAG
gtggtgttagttacttctga

SEQ ID NO: 9101 - DNA, 20 bp, Artificial Sequence
  Description of Artificial Sequence: Synthetic oligonucleotide
  Target: APOC3; (+) strand; PAM type: NRG; PAM sequence: AGG
tggtgttagttacttctgag

SEQ ID NO: 9102 - DNA, 20 bp, Artificial Sequence
  Description of Artificial Sequence: Synthetic oligonucleotide
  Target: APOC3; (+) strand; PAM type: NRG; PAM sequence: CAG
gttagttacttctgagagga

SEQ ID NO: 9103 - DNA, 20 bp, Artificial Sequence
  Description of Artificial Sequence: Synthetic oligonucleotide
  Target: APOC3; (+) strand; PAM type: NRG; PAM sequence: CAG
ctgagaggacagcttgctgc

SEQ ID NO: 9104 - DNA, 20 bp, Artificial Sequence
  Description of Artificial Sequence: Synthetic oligonucleotide
  Target: APOC3; (+) strand; PAM type: NRG; PAM sequence: GAG
gagaggacagcttgctgcca

SEQ ID NO: 9105 - DNA, 20 bp, Artificial Sequence
  Description of Artificial Sequence: Synthetic oligonucleotide
  Target: APOC3; (+) strand; PAM type: NRG; PAM sequence: TAG
cagagctctattttttatgt

SEQ ID NO: 9106 - DNA, 20 bp, Artificial Sequence
  Description of Artificial Sequence: Synthetic oligonucleotide
  Target: APOC3; (+) strand; PAM type: NRG; PAM sequence: GAG
gagctctattttttatgtta

SEQ ID NO: 9107 - DNA, 20 bp, Artificial Sequence
  Description of Artificial Sequence: Synthetic oligonucleotide
  Target: APOC3; (+) strand; PAM type: NRG; PAM sequence: AGG
agctctattttttatgttag

SEQ ID NO: 9108 - DNA, 20 bp, Artificial Sequence
  Description of Artificial Sequence: Synthetic oligonucleotide
  Target: APOC3; (+) strand; PAM type: NRG; PAM sequence: CAG
ttagaggctccttctgcctg

SEQ ID NO: 9109 - DNA, 20 bp, Artificial Sequence
  Description of Artificial Sequence: Synthetic oligonucleotide
  Target: APOC3; (+) strand; PAM type: NRG; PAM sequence: TGG
tgcctgcagactctgctgtc

SEQ ID NO: 9110 - DNA, 20 bp, Artificial Sequence
  Description of Artificial Sequence: Synthetic oligonucleotide
  Target: APOC3; (+) strand; PAM type: NRG; PAM sequence: GGG
gcctgcagactctgctgtct

SEQ ID NO: 9111 - DNA, 20 bp, Artificial Sequence
  Description of Artificial Sequence: Synthetic oligonucleotide
  Target: APOC3; (+) strand; PAM type: NRG; PAM sequence: AAG
tgcagactctgctgtctggg

SEQ ID NO: 9112 - DNA, 20 bp, Artificial Sequence
  Description of Artificial Sequence: Synthetic oligonucleotide
  Target: APOC3; (+) strand; PAM type: NRG; PAM sequence: AGG
gcagactctgctgtctggga

SEQ ID NO: 9113 - DNA, 20 bp, Artificial Sequence
  Description of Artificial Sequence: Synthetic oligonucleotide
  Target: APOC3; (+) strand; PAM type: NRG; PAM sequence: GGG
cagactctgctgtctgggaa

SEQ ID NO: 9114 - DNA, 20 bp, Artificial Sequence
  Description of Artificial Sequence: Synthetic oligonucleotide
  Target: APOC3; (+) strand; PAM type: NRG; PAM sequence: CAG
tctgctgtctgggaagggca

SEQ ID NO: 9115 - DNA, 20 bp, Artificial Sequence
  Description of Artificial Sequence: Synthetic oligonucleotide
  Target: APOC3; (+) strand; PAM type: NRG; PAM sequence: TAG
gtctgggaagggcacagcgt

SEQ ID NO: 9116 - DNA, 20 bp, Artificial Sequence
  Description of Artificial Sequence: Synthetic oligonucleotide
  Target: APOC3; (+) strand; PAM type: NRG; PAM sequence: AGG
tctgggaagggcacagcgtt

SEQ ID NO: 9117 - DNA, 20 bp, Artificial Sequence
  Description of Artificial Sequence: Synthetic oligonucleotide
  Target: APOC3; (+) strand; PAM type: NRG; PAM sequence: GAG
tgggaagggcacagcgttag

SEQ ID NO: 9118 - DNA, 20 bp, Artificial Sequence
  Description of Artificial Sequence: Synthetic oligonucleotide
  Target: APOC3; (+) strand; PAM type: NRG; PAM sequence: AGG
gggaagggcacagcgttagg

SEQ ID NO: 9119 - DNA, 20 bp, Artificial Sequence
  Description of Artificial Sequence: Synthetic oligonucleotide
  Target: APOC3; (+) strand; PAM type: NRG; PAM sequence: GGG
ggaagggcacagcgttagga

SEQ ID NO: 9120 - DNA, 20 bp, Artificial Sequence
  Description of Artificial Sequence: Synthetic oligonucleotide
  Target: APOC3; (+) strand; PAM type: NRG; PAM sequence: GAG
aagggcacagcgttaggagg

SEQ ID NO: 9121 - DNA, 20 bp, Artificial Sequence
  Description of Artificial Sequence: Synthetic oligonucleotide
  Target: APOC3; (+) strand; PAM type: NRG; PAM sequence: GAG
gggcacagcgttaggaggga

SEQ ID NO: 9122 - DNA, 20 bp, Artificial Sequence
  Description of Artificial Sequence: Synthetic oligonucleotide
  Target: APOC3; (+) strand; PAM type: NRG; PAM sequence: AGG
ggcacagcgttaggagggag

SEQ ID NO: 9123 - DNA, 20 bp, Artificial Sequence
  Description of Artificial Sequence: Synthetic oligonucleotide
  Target: APOC3; (+) strand; PAM type: NRG; PAM sequence: GGG
gcacagcgttaggagggaga

SEQ ID NO: 9124 - DNA, 20 bp, Artificial Sequence
  Description of Artificial Sequence: Synthetic oligonucleotide
  Target: APOC3; (+) strand; PAM type: NRG; PAM sequence: GAG
acagcgttaggagggagagg

SEQ ID NO: 9125 - DNA, 20 bp, Artificial Sequence
  Description of Artificial Sequence: Synthetic oligonucleotide
  Target: APOC3; (+) strand; PAM type: NRG; PAM sequence: AGG
cagcgttaggagggagaggg

SEQ ID NO: 9126 - DNA, 20 bp, Artificial Sequence
  Description of Artificial Sequence: Synthetic oligonucleotide
  Target: APOC3; (+) strand; PAM type: NRG; PAM sequence: GAG
taggagggagagggaggtgt

SEQ ID NO: 9127 - DNA, 20 bp, Artificial Sequence
  Description of Artificial Sequence: Synthetic oligonucleotide
  Target: APOC3; (+) strand; PAM type: NRG; PAM sequence: TGG
gggaggtgtgagtccctcca

SEQ ID NO: 9128 - DNA, 20 bp, Artificial Sequence
  Description of Artificial Sequence: Synthetic oligonucleotide
  Target: APOC3; (+) strand; PAM type: NRG; PAM sequence: CAG
tctctatctcatttcctttt

SEQ ID NO: 9129 - DNA, 20 bp, Artificial Sequence
  Description of Artificial Sequence: Synthetic oligonucleotide
  Target: APOC3; (+) strand; PAM type: NRG; PAM sequence: TGG
tttccttttcagcaccactc

SEQ ID NO: 9130 - DNA, 20 bp, Artificial Sequence
  Description of Artificial Sequence: Synthetic oligonucleotide
  Target: APOC3; (+) strand; PAM type: NRG; PAM sequence: GGG
ttccttttcagcaccactct

SEQ ID NO: 9131 - DNA, 20 bp, Artificial Sequence
  Description of Artificial Sequence: Synthetic oligonucleotide
  Target: APOC3; (+) strand; PAM type: NRG; PAM sequence: CAG
tcagcaccactctgggcaat

SEQ ID NO: 9132 - DNA, 20 bp, Artificial Sequence
  Description of Artificial Sequence: Synthetic oligonucleotide
  Target: APOC3; (+) strand; PAM type: NRG; PAM sequence: CAG
actctgggcaatcagtattc

SEQ ID NO: 9133 - DNA, 20 bp, Artificial Sequence
  Description of Artificial Sequence: Synthetic oligonucleotide
  Target: APOC3; (+) strand; PAM type: NRG; PAM sequence: CAG
ttccagccccattttatcct

SEQ ID NO: 9134 - DNA, 20 bp, Artificial Sequence
  Description of Artificial Sequence: Synthetic oligonucleotide
  Target: APOC3; (+) strand; PAM type: NRG; PAM sequence: GAG
cattttatcctcagaaaatt

SEQ ID NO: 9135 - DNA, 20 bp, Artificial Sequence
  Description of Artificial Sequence: Synthetic oligonucleotide
  Target: APOC3; (+) strand; PAM type: NRG; PAM sequence: AGG
attttatcctcagaaaattg

SEQ ID NO: 9136 - DNA, 20 bp, Artificial Sequence
  Description of Artificial Sequence: Synthetic oligonucleotide
  Target: APOC3; (+) strand; PAM type: NRG; PAM sequence: GAG
cctcagaaaattgaggctct

SEQ ID NO: 9137 - DNA, 20 bp, Artificial Sequence
  Description of Artificial Sequence: Synthetic oligonucleotide
  Target: APOC3; (+) strand; PAM type: NRG; PAM sequence: TGG
gagatgttatctctgtgacc

SEQ ID NO: 9138 - DNA, 20 bp, Artificial Sequence
  Description of Artificial Sequence: Synthetic oligonucleotide
  Target: APOC3; (+) strand; PAM type: NRG; PAM sequence: GGG
agatgttatctctgtgacct

SEQ ID NO: 9139 - DNA, 20 bp, Artificial Sequence
  Description of Artificial Sequence: Synthetic oligonucleotide
  Target: APOC3; (+) strand; PAM type: NRG; PAM sequence: AAG
ctgggtcctattacgtgcca

SEQ ID NO: 9140 - DNA, 20 bp, Artificial Sequence
  Description of Artificial Sequence: Synthetic oligonucleotide
  Target: APOC3; (+) strand; PAM type: NRG; PAM sequence: AGG
tgggtcctattacgtgccaa

SEQ ID NO: 9141 - DNA, 20 bp, Artificial Sequence
  Description of Artificial Sequence: Synthetic oligonucleotide
  Target: APOC3; (+) strand; PAM type: NRG; PAM sequence: AAG
acgtgccaaaggcatcattt

SEQ ID NO: 9142 - DNA, 20 bp, Artificial Sequence
  Description of Artificial Sequence: Synthetic oligonucleotide
  Target: APOC3; (+) strand; PAM type: NRG; PAM sequence: AAG
caaaggcatcatttaagcct

SEQ ID NO: 9143 - DNA, 20 bp, Artificial Sequence
  Description of Artificial Sequence: Synthetic oligonucleotide
  Target: APOC3; (+) strand; PAM type: NRG; PAM sequence: TGG
catttaagcctaagatgtcc

SEQ ID NO: 9144 - DNA, 20 bp, Artificial Sequence
  Description of Artificial Sequence: Synthetic oligonucleotide
  Target: APOC3; (+) strand; PAM type: NRG; PAM sequence: AAG
gcctaagatgtcctggctcc

SEQ ID NO: 9145 - DNA, 20 bp, Artificial Sequence
  Description of Artificial Sequence: Synthetic oligonucleotide
  Target: APOC3; (+) strand; PAM type: NRG; PAM sequence: AGG
cctaagatgtcctggctcca

SEQ ID NO: 9146 - DNA, 20 bp, Artificial Sequence
  Description of Artificial Sequence: Synthetic oligonucleotide
  Target: APOC3; (+) strand; PAM type: NRG; PAM sequence: CAG
atgtcctggctccaaggtgt

SEQ ID NO: 9147 - DNA, 20 bp, Artificial Sequence
  Description of Artificial Sequence: Synthetic oligonucleotide
  Target: APOC3; (+) strand; PAM type: NRG; PAM sequence: TGG
ggctccaaggtgtcagcatc

SEQ ID NO: 9148 - DNA, 20 bp, Artificial Sequence
  Description of Artificial Sequence: Synthetic oligonucleotide
  Target: APOC3; (+) strand; PAM type: NRG; PAM sequence: AAG
tccaaggtgtcagcatctgg

SEQ ID NO: 9149 - DNA, 20 bp, Artificial Sequence
  Description of Artificial Sequence: Synthetic oligonucleotide
  Target: APOC3; (+) strand; PAM type: NRG; PAM sequence: CAG
aggtgtcagcatctggaaga

SEQ ID NO: 9150 - DNA, 20 bp, Artificial Sequence
  Description of Artificial Sequence: Synthetic oligonucleotide
  Target: APOC3; (+) strand; PAM type: NRG; PAM sequence: AGG
ggtgtcagcatctggaagac

SEQ ID NO: 9151 - DNA, 20 bp, Artificial Sequence
  Description of Artificial Sequence: Synthetic oligonucleotide
  Target: APOC3; (+) strand; PAM type: NRG; PAM sequence: CGG
tcatcctgccatccctgctg

SEQ ID NO: 9152 - DNA, 20 bp, Artificial Sequence
  Description of Artificial Sequence: Synthetic oligonucleotide
  Target: APOC3; (+) strand; PAM type: NRG; PAM sequence: TGG
tccctgctgcggcttcactg

SEQ ID NO: 9153 - DNA, 20 bp, Artificial Sequence
  Description of Artificial Sequence: Synthetic oligonucleotide
  Target: APOC3; (+) strand; PAM type: NRG; PAM sequence: GGG
ccctgctgcggcttcactgt

SEQ ID NO: 9154 - DNA, 20 bp, Artificial Sequence
  Description of Artificial Sequence: Synthetic oligonucleotide
  Target: APOC3; (+) strand; PAM type: NRG; PAM sequence: CAG
ctgcggcttcactgtgggcc

SEQ ID NO: 9155 - DNA, 20 bp, Artificial Sequence
  Description of Artificial Sequence: Synthetic oligonucleotide
  Target: APOC3; (+) strand; PAM type: NRG; PAM sequence: AGG
tgcggcttcactgtgggccc

SEQ ID NO: 9156 - DNA, 20 bp, Artificial Sequence
  Description of Artificial Sequence: Synthetic oligonucleotide
  Target: APOC3; (+) strand; PAM type: NRG; PAM sequence: GGG
gcggcttcactgtgggccca

SEQ ID NO: 9157 - DNA, 20 bp, Artificial Sequence
  Description of Artificial Sequence: Synthetic oligonucleotide
  Target: APOC3; (+) strand; PAM type: NRG; PAM sequence: GGG
cggcttcactgtgggcccag

SEQ ID NO: 9158 - DNA, 20 bp, Artificial Sequence
  Description of Artificial Sequence: Synthetic oligonucleotide
  Target: APOC3; (+) strand; PAM type: NRG; PAM sequence: CAG
tgtgggcccaggggacatct

SEQ ID NO: 9159 - DNA, 20 bp, Artificial Sequence
  Description of Artificial Sequence: Synthetic oligonucleotide
  Target: APOC3; (+) strand; PAM type: NRG; PAM sequence: GAG
ccaggggacatctcagcccc

SEQ ID NO: 9160 - DNA, 20 bp, Artificial Sequence
  Description of Artificial Sequence: Synthetic oligonucleotide
  Target: APOC3; (+) strand; PAM type: NRG; PAM sequence: AAG
ggggacatctcagccccgag

SEQ ID NO: 9161 - DNA, 20 bp, Artificial Sequence
  Description of Artificial Sequence: Synthetic oligonucleotide
  Target: APOC3; (+) strand; PAM type: NRG; PAM sequence: AGG
gggacatctcagccccgaga

SEQ ID NO: 9162 - DNA, 20 bp, Artificial Sequence
  Description of Artificial Sequence: Synthetic oligonucleotide
  Target: APOC3; (+) strand; PAM type: NRG; PAM sequence: GGG
ggacatctcagccccgagaa

SEQ ID NO: 9163 - DNA, 20 bp, Artificial Sequence
  Description of Artificial Sequence: Synthetic oligonucleotide
  Target: APOC3; (+) strand; PAM type: NRG; PAM sequence: CAG
atctcagccccgagaagggt

SEQ ID NO: 9164 - DNA, 20 bp, Artificial Sequence
  Description of Artificial Sequence: Synthetic oligonucleotide
  Target: APOC3; (+) strand; PAM type: NRG; PAM sequence: CGG
tcagccccgagaagggtcag

SEQ ID NO: 9165 - DNA, 20 bp, Artificial Sequence
  Description of Artificial Sequence: Synthetic oligonucleotide
  Target: APOC3; (+) strand; PAM type: NRG; PAM sequence: TGG
gaagggtcagcggcccctcc

SEQ ID NO: 9166 - DNA, 20 bp, Artificial Sequence
  Description of Artificial Sequence: Synthetic oligonucleotide
  Target: APOC3; (+) strand; PAM type: NRG; PAM sequence: CAG
cctggaccaccgactccccg

SEQ ID NO: 9167 - DNA, 20 bp, Artificial Sequence
  Description of Artificial Sequence: Synthetic oligonucleotide
  Target: APOC3; (+) strand; PAM type: NRG; PAM sequence: CAG
cctctgtgccctctcctcac

SEQ ID NO: 9168 - DNA, 20 bp, Artificial Sequence
  Description of Artificial Sequence: Synthetic oligonucleotide
  Target: APOC3; (+) strand; PAM type: NRG; PAM sequence: CAG
tcaccagaccttgttcctcc

SEQ ID NO: 9169 - DNA, 20 bp, Artificial Sequence
  Description of Artificial Sequence: Synthetic oligonucleotide
  Target: APOC3; (+) strand; PAM type: NRG; PAM sequence: CAG
gttcctcccagttgctccca

SEQ ID NO: 9170 - DNA, 20 bp, Artificial Sequence
  Description of Artificial Sequence: Synthetic oligonucleotide
  Target: APOC3; (+) strand; PAM type: NRG; PAM sequence: CAG
ctcccagttgctcccacagc

SEQ ID NO: 9171 - DNA, 20 bp, Artificial Sequence
  Description of Artificial Sequence: Synthetic oligonucleotide
  Target: APOC3; (+) strand; PAM type: NRG; PAM sequence: AGG
tcccagttgctcccacagcc

SEQ ID NO: 9172 - DNA, 20 bp, Artificial Sequence
  Description of Artificial Sequence: Synthetic oligonucleotide
  Target: APOC3; (+) strand; PAM type: NRG; PAM sequence: GGG
cccagttgctcccacagcca

SEQ ID NO: 9173 - DNA, 20 bp, Artificial Sequence
  Description of Artificial Sequence: Synthetic oligonucleotide
  Target: APOC3; (+) strand; PAM type: NRG; PAM sequence: GGG
ccagttgctcccacagccag

SEQ ID NO: 9174 - DNA, 20 bp, Artificial Sequence
  Description of Artificial Sequence: Synthetic oligonucleotide
  Target: APOC3; (+) strand; PAM type: NRG; PAM sequence: GGG
cagttgctcccacagccagg

SEQ ID NO: 9175 - DNA, 20 bp, Artificial Sequence
  Description of Artificial Sequence: Synthetic oligonucleotide
  Target: APOC3; (+) strand; PAM type: NRG; PAM sequence: CAG
ttgctcccacagccaggggg

SEQ ID NO: 9176 - DNA, 20 bp, Artificial Sequence
  Description of Artificial Sequence: Synthetic oligonucleotide
  Target: APOC3; (+) strand; PAM type: NRG; PAM sequence: GAG
tcccacagccagggggcagt

SEQ ID NO: 9177 - DNA, 20 bp, Artificial Sequence
  Description of Artificial Sequence: Synthetic oligonucleotide
  Target: APOC3; (+) strand; PAM type: NRG; PAM sequence: AGG
cccacagccagggggcagtg

SEQ ID NO: 9178 - DNA, 20 bp, Artificial Sequence
  Description of Artificial Sequence: Synthetic oligonucleotide
  Target: APOC3; (+) strand; PAM type: NRG; PAM sequence: GGG
ccacagccagggggcagtga

SEQ ID NO: 9179 - DNA, 20 bp, Artificial Sequence
  Description of Artificial Sequence: Synthetic oligonucleotide
  Target: APOC3; (+) strand; PAM type: NRG; PAM sequence: CAG
agtgagggctgctcttcccc

SEQ ID NO: 9180 - DNA, 20 bp, Artificial Sequence
  Description of Artificial Sequence: Synthetic oligonucleotide
  Target: APOC3; (+) strand; PAM type: NRG; PAM sequence: GAG
gctcttcccccagccccact

SEQ ID NO: 9181 - DNA, 20 bp, Artificial Sequence
  Description of Artificial Sequence: Synthetic oligonucleotide
  Target: APOC3; (+) strand; PAM type: NRG; PAM sequence: AGG
ctcttcccccagccccactg

SEQ ID NO: 9182 - DNA, 20 bp, Artificial Sequence
  Description of Artificial Sequence: Synthetic oligonucleotide
  Target: APOC3; (+) strand; PAM type: NRG; PAM sequence: CAG
cccagccccactgaggaacc

SEQ ID NO: 9183 - DNA, 20 bp, Artificial Sequence
  Description of Artificial Sequence: Synthetic oligonucleotide
  Target: APOC3; (+) strand; PAM type: NRG; PAM sequence: AGG
ccagccccactgaggaaccc

SEQ ID NO: 9184 - DNA, 20 bp, Artificial Sequence
  Description of Artificial Sequence: Synthetic oligonucleotide
  Target: APOC3; (+) strand; PAM type: NRG; PAM sequence: AAG
gccccactgaggaacccagg

SEQ ID NO: 9185 - DNA, 20 bp, Artificial Sequence
  Description of Artificial Sequence: Synthetic oligonucleotide
  Target: APOC3; (+) strand; PAM type: NRG; PAM sequence: AGG
ccccactgaggaacccagga

SEQ ID NO: 9186 - DNA, 20 bp, Artificial Sequence
  Description of Artificial Sequence: Synthetic oligonucleotide
  Target: APOC3; (+) strand; PAM type: NRG; PAM sequence: GAG
aggaacccaggaaggtgaac

SEQ ID NO: 9187 - DNA, 20 bp, Artificial Sequence
  Description of Artificial Sequence: Synthetic oligonucleotide
  Target: APOC3; (+) strand; PAM type: NRG; PAM sequence: GAG
gaacccaggaaggtgaacga

SEQ ID NO: 9188 - DNA, 20 bp, Artificial Sequence
  Description of Artificial Sequence: Synthetic oligonucleotide
  Target: APOC3; (+) strand; PAM type: NRG; PAM sequence: CAG
aggaaggtgaacgagagaat

SEQ ID NO: 9189 - DNA, 20 bp, Artificial Sequence
  Description of Artificial Sequence: Synthetic oligonucleotide
  Target: APOC3; (+) strand; PAM type: NRG; PAM sequence: TGG
gtgaacgagagaatcagtcc

SEQ ID NO: 9190 - DNA, 20 bp, Artificial Sequence
  Description of Artificial Sequence: Synthetic oligonucleotide
  Target: APOC3; (+) strand; PAM type: NRG; PAM sequence: TGG
aacgagagaatcagtcctgg

SEQ ID NO: 9191 - DNA, 20 bp, Artificial Sequence
  Description of Artificial Sequence: Synthetic oligonucleotide
  Target: APOC3; (+) strand; PAM type: NRG; PAM sequence: GGG
acgagagaatcagtcctggt

SEQ ID NO: 9192 - DNA, 20 bp, Artificial Sequence
  Description of Artificial Sequence: Synthetic oligonucleotide
  Target: APOC3; (+) strand; PAM type: NRG; PAM sequence: GGG
cgagagaatcagtcctggtg

SEQ ID NO: 9193 - DNA, 20 bp, Artificial Sequence
  Description of Artificial Sequence: Synthetic oligonucleotide
  Target: APOC3; (+) strand; PAM type: NRG; PAM sequence: GGG
gagagaatcagtcctggtgg

SEQ ID NO: 9194 - DNA, 20 bp, Artificial Sequence
  Description of Artificial Sequence: Synthetic oligonucleotide
  Target: APOC3; (+) strand; PAM type: NRG; PAM sequence: TGG
gaatcagtcctggtgggggc

SEQ ID NO: 9195 - DNA, 20 bp, Artificial Sequence
  Description of Artificial Sequence: Synthetic oligonucleotide
  Target: APOC3; (+) strand; PAM type: NRG; PAM sequence: GGG
aatcagtcctggtgggggct

SEQ ID NO: 9196 - DNA, 20 bp, Artificial Sequence
  Description of Artificial Sequence: Synthetic oligonucleotide
  Target: APOC3; (+) strand; PAM type: NRG; PAM sequence: GGG
atcagtcctggtgggggctg

SEQ ID NO: 9197 - DNA, 20 bp, Artificial Sequence
  Description of Artificial Sequence: Synthetic oligonucleotide
  Target: APOC3; (+) strand; PAM type: NRG; PAM sequence: GAG
cagtcctggtgggggctggg

SEQ ID NO: 9198 - DNA, 20 bp, Artificial Sequence
  Description of Artificial Sequence: Synthetic oligonucleotide
  Target: APOC3; (+) strand; PAM type: NRG; PAM sequence: AGG
agtcctggtgggggctgggg

SEQ ID NO: 9199 - DNA, 20 bp, Artificial Sequence
  Description of Artificial Sequence: Synthetic oligonucleotide
  Target: APOC3; (+) strand; PAM type: NRG; PAM sequence: GGG
gtcctggtgggggctgggga

SEQ ID NO: 9200 - DNA, 20 bp, Artificial Sequence
  Description of Artificial Sequence: Synthetic oligonucleotide
  Target: APOC3; (+) strand; PAM type: NRG; PAM sequence: CAG
gtgggggctggggagggccc

SEQ ID NO: 9201 - DNA, 20 bp, Artificial Sequence
  Description of Artificial Sequence: Synthetic oligonucleotide
  Target: APOC3; (+) strand; PAM type: NRG; PAM sequence: GAG
ctggggagggccccagacat

SEQ ID NO: 9202 - DNA, 20 bp, Artificial Sequence
  Description of Artificial Sequence: Synthetic oligonucleotide
  Target: APOC3; (+) strand; PAM type: NRG; PAM sequence: CAG
gagggccccagacatgagac

SEQ ID NO: 9203 - DNA, 20 bp, Artificial Sequence
  Description of Artificial Sequence: Synthetic oligonucleotide
  Target: APOC3; (+) strand; PAM type: NRG; PAM sequence: CAG
catgagaccagctcctcccc

SEQ ID NO: 9204 - DNA, 20 bp, Artificial Sequence
  Description of Artificial Sequence: Synthetic oligonucleotide
  Target: APOC3; (+) strand; PAM type: NRG; PAM sequence: AGG
atgagaccagctcctccccc

SEQ ID NO: 9205 - DNA, 20 bp, Artificial Sequence
  Description of Artificial Sequence: Synthetic oligonucleotide
  Target: APOC3; (+) strand; PAM type: NRG; PAM sequence: GGG
tgagaccagctcctccccca

SEQ ID NO: 9206 - DNA, 20 bp, Artificial Sequence
  Description of Artificial Sequence: Synthetic oligonucleotide
  Target: APOC3; (+) strand; PAM type: NRG; PAM sequence: GGG
gagaccagctcctcccccag

SEQ ID NO: 9207 - DNA, 20 bp, Artificial Sequence
  Description of Artificial Sequence: Synthetic oligonucleotide
  Target: APOC3; (+) strand; PAM type: NRG; PAM sequence: CAG
cctcccccaggggatgttat

SEQ ID NO: 9208 - DNA, 20 bp, Artificial Sequence
  Description of Artificial Sequence: Synthetic oligonucleotide
  Target: APOC3; (+) strand; PAM type: NRG; PAM sequence: TGG
cccccaggggatgttatcag

SEQ ID NO: 9209 - DNA, 20 bp, Artificial Sequence
  Description of Artificial Sequence: Synthetic oligonucleotide
  Target: APOC3; (+) strand; PAM type: NRG; PAM sequence: GGG
ccccaggggatgttatcagt

SEQ ID NO: 9210 - DNA, 20 bp, Artificial Sequence
  Description of Artificial Sequence: Synthetic oligonucleotide
  Target: APOC3; (+) strand; PAM type: NRG; PAM sequence: CAG
ggggatgttatcagtgggtc

SEQ ID NO: 9211 - DNA, 20 bp, Artificial Sequence
  Description of Artificial Sequence: Synthetic oligonucleotide
  Target: APOC3; (+) strand; PAM type: NRG; PAM sequence: GAG
ggatgttatcagtgggtcca

SEQ ID NO: 9212 - DNA, 20 bp, Artificial Sequence
  Description of Artificial Sequence: Synthetic oligonucleotide
  Target: APOC3; (+) strand; PAM type: NRG; PAM sequence: AGG
gatgttatcagtgggtccag

SEQ ID NO: 9213 - DNA, 20 bp, Artificial Sequence
  Description of Artificial Sequence: Synthetic oligonucleotide
  Target: APOC3; (+) strand; PAM type: NRG; PAM sequence: GGG
atgttatcagtgggtccaga

SEQ ID NO: 9214 - DNA, 20 bp, Artificial Sequence
  Description of Artificial Sequence: Synthetic oligonucleotide
  Target: APOC3; (+) strand; PAM type: NRG; PAM sequence: TAG
agtgggtccagagggcaaaa

SEQ ID NO: 9215 - DNA, 20 bp, Artificial Sequence
  Description of Artificial Sequence: Synthetic oligonucleotide
  Target: APOC3; (+) strand; PAM type: NRG; PAM sequence: AGG
gtgggtccagagggcaaaat

SEQ ID NO: 9216 - DNA, 20 bp, Artificial Sequence
  Description of Artificial Sequence: Synthetic oligonucleotide
  Target: APOC3; (+) strand; PAM type: NRG; PAM sequence: GGG
tgggtccagagggcaaaata

SEQ ID NO: 9217 - DNA, 20 bp, Artificial Sequence
  Description of Artificial Sequence: Synthetic oligonucleotide
  Target: APOC3; (+) strand; PAM type: NRG; PAM sequence: GAG
ggtccagagggcaaaatagg

SEQ ID NO: 9218 - DNA, 20 bp, Artificial Sequence
  Description of Artificial Sequence: Synthetic oligonucleotide
  Target: APOC3; (+) strand; PAM type: NRG; PAM sequence: TGG
agagggcaaaatagggagcc

SEQ ID NO: 9219 - DNA, 20 bp, Artificial Sequence
  Description of Artificial Sequence: Synthetic oligonucleotide
  Target: APOC3; (+) strand; PAM type: NRG; PAM sequence: TGG
gggcaaaatagggagcctgg

SEQ ID NO: 9220 - DNA, 20 bp, Artificial Sequence
  Description of Artificial Sequence: Synthetic oligonucleotide
  Target: APOC3; (+) strand; PAM type: NRG; PAM sequence: GAG
gcaaaatagggagcctggtg

SEQ ID NO: 9221 - DNA, 20 bp, Artificial Sequence
  Description of Artificial Sequence: Synthetic oligonucleotide
  Target: APOC3; (+) strand; PAM type: NRG; PAM sequence: AGG
caaaatagggagcctggtgg

SEQ ID NO: 9222 - DNA, 20 bp, Artificial Sequence
  Description of Artificial Sequence: Synthetic oligonucleotide
  Target: APOC3; (+) strand; PAM type: NRG; PAM sequence: GGG
aaaatagggagcctggtgga

SEQ ID NO: 9223 - DNA, 20 bp, Artificial Sequence
  Description of Artificial Sequence: Synthetic oligonucleotide
  Target: APOC3; (+) strand; PAM type: NRG; PAM sequence: GAG
aatagggagcctggtggagg

SEQ ID NO: 9224 - DNA, 20 bp, Artificial Sequence
  Description of Artificial Sequence: Synthetic oligonucleotide
  Target: APOC3; (+) strand; PAM type: NRG; PAM sequence: AGG
atagggagcctggtggaggg

SEQ ID NO: 9225 - DNA, 20 bp, Artificial Sequence
  Description of Artificial Sequence: Synthetic oligonucleotide
  Target: APOC3; (+) strand; PAM type: NRG; PAM sequence: GGG
tagggagcctggtggaggga

SEQ ID NO: 9226 - DNA, 20 bp, Artificial Sequence
  Description of Artificial Sequence: Synthetic oligonucleotide
  Target: APOC3; (+) strand; PAM type: NRG; PAM sequence: GGG
agggagcctggtggagggag

SEQ ID NO: 9227 - DNA, 20 bp, Artificial Sequence
  Description of Artificial Sequence: Synthetic oligonucleotide
  Target: APOC3; (+) strand; PAM type: NRG; PAM sequence: AAG
gcctggtggagggaggggca

SEQ ID NO: 9228 - DNA, 20 bp, Artificial Sequence
  Description of Artificial Sequence: Synthetic oligonucleotide
  Target: APOC3; (+) strand; PAM type: NRG; PAM sequence: AGG
cctggtggagggaggggcaa

SEQ ID NO: 9229 - DNA, 20 bp, Artificial Sequence
  Description of Artificial Sequence: Synthetic oligonucleotide
  Target: APOC3; (+) strand; PAM type: NRG; PAM sequence: CGG
ggagggaggggcaaaggcct

SEQ ID NO: 9230 - DNA, 20 bp, Artificial Sequence
  Description of Artificial Sequence: Synthetic oligonucleotide
  Target: APOC3; (+) strand; PAM type: NRG; PAM sequence: GGG
gagggaggggcaaaggcctc

SEQ ID NO: 9231 - DNA, 20 bp, Artificial Sequence
  Description of Artificial Sequence: Synthetic oligonucleotide
  Target: APOC3; (+) strand; PAM type: NRG; PAM sequence: GAG
gggcaaaggcctcgggctct

SEQ ID NO: 9232 - DNA, 20 bp, Artificial Sequence
  Description of Artificial Sequence: Synthetic oligonucleotide
  Target: APOC3; (+) strand; PAM type: NRG; PAM sequence: CGG
caaaggcctcgggctctgag

SEQ ID NO: 9233 - DNA, 20 bp, Artificial Sequence
  Description of Artificial Sequence: Synthetic oligonucleotide
  Target: APOC3; (+) strand; PAM type: NRG; PAM sequence: TGG
cctcgggctctgagcggcct

SEQ ID NO: 9234 - DNA, 20 bp, Artificial Sequence
  Description of Artificial Sequence: Synthetic oligonucleotide
  Target: APOC3; (+) strand; PAM type: NRG; PAM sequence: AAG
accaacccctgccctacact

SEQ ID NO: 9235 - DNA, 20 bp, Artificial Sequence
  Description of Artificial Sequence: Synthetic oligonucleotide
  Target: APOC3; (+) strand; PAM type: NRG; PAM sequence: AGG
ccaacccctgccctacacta

SEQ ID NO: 9236 - DNA, 20 bp, Artificial Sequence
  Description of Artificial Sequence: Synthetic oligonucleotide
  Target: APOC3; (+) strand; PAM type: NRG; PAM sequence: GGG
caacccctgccctacactaa

SEQ ID NO: 9237 - DNA, 20 bp, Artificial Sequence
  Description of Artificial Sequence: Synthetic oligonucleotide
  Target: APOC3; (+) strand; PAM type: NRG; PAM sequence: GGG
aacccctgccctacactaag

SEQ ID NO: 9238 - DNA, 20 bp, Artificial Sequence
  Description of Artificial Sequence: Synthetic oligonucleotide
  Target: APOC3; (+) strand; PAM type: NRG; PAM sequence: GGG
acccctgccctacactaagg

SEQ ID NO: 9239 - DNA, 20 bp, Artificial Sequence
  Description of Artificial Sequence: Synthetic oligonucleotide
  Target: APOC3; (+) strand; PAM type: NRG; PAM sequence: GAG
ccctgccctacactaagggg

SEQ ID NO: 9240 - DNA, 20 bp, Artificial Sequence
  Description of Artificial Sequence: Synthetic oligonucleotide
  Target: APOC3; (+) strand; PAM type: NRG; PAM sequence: AGG
cctgccctacactaaggggg

SEQ ID NO: 9241 - DNA, 20 bp, Artificial Sequence
  Description of Artificial Sequence: Synthetic oligonucleotide
  Target: APOC3; (+) strand; PAM type: NRG; PAM sequence: CAG
gccctacactaagggggagg

SEQ ID NO: 9242 - DNA, 20 bp, Artificial Sequence
  Description of Artificial Sequence: Synthetic oligonucleotide
  Target: APOC3; (+) strand; PAM type: NRG; PAM sequence: CGG
ctacactaagggggaggcag

SEQ ID NO: 9243 - DNA, 20 bp, Artificial Sequence
  Description of Artificial Sequence: Synthetic oligonucleotide
  Target: APOC3; (+) strand; PAM type: NRG; PAM sequence: GGG
tacactaagggggaggcagc

SEQ ID NO: 9244 - DNA, 20 bp, Artificial Sequence
  Description of Artificial Sequence: Synthetic oligonucleotide
  Target: APOC3; (+) strand; PAM type: NRG; PAM sequence: GGG
acactaagggggaggcagcg

SEQ ID NO: 9245 - DNA, 20 bp, Artificial Sequence
  Description of Artificial Sequence: Synthetic oligonucleotide
  Target: APOC3; (+) strand; PAM type: NRG; PAM sequence: GGG
cactaagggggaggcagcgg

SEQ ID NO: 9246 - DNA, 20 bp, Artificial Sequence
  Description of Artificial Sequence: Synthetic oligonucleotide
  Target: APOC3; (+) strand; PAM type: NRG; PAM sequence: GGG
actaagggggaggcagcggg

SEQ ID NO: 9247 - DNA, 20 bp, Artificial Sequence
  Description of Artificial Sequence: Synthetic oligonucleotide
  Target: APOC3; (+) strand; PAM type: NRG; PAM sequence: CAG
gggaggcagcggggggcaca

SEQ ID NO: 9248 - DNA, 20 bp, Artificial Sequence
  Description of Artificial Sequence: Synthetic oligonucleotide
  Target: APOC3; (+) strand; PAM type: NRG; PAM sequence: AGG
ggaggcagcggggggcacac

SEQ ID NO: 9249 - DNA, 20 bp, Artificial Sequence
  Description of Artificial Sequence: Synthetic oligonucleotide
  Target: APOC3; (+) strand; PAM type: NRG; PAM sequence: GGG
gaggcagcggggggcacaca

SEQ ID NO: 9250 - DNA, 20 bp, Artificial Sequence
  Description of Artificial Sequence: Synthetic oligonucleotide
  Target: APOC3; (+) strand; PAM type: NRG; PAM sequence: TGG
gcagcggggggcacacaggg

SEQ ID NO: 9251 - DNA, 20 bp, Artificial Sequence
  Description of Artificial Sequence: Synthetic oligonucleotide
  Target: APOC3; (+) strand; PAM type: NRG; PAM sequence: GGG
cagcggggggcacacagggt

SEQ ID NO: 9252 - DNA, 20 bp, Artificial Sequence
  Description of Artificial Sequence: Synthetic oligonucleotide
  Target: APOC3; (+) strand; PAM type: NRG; PAM sequence: GGG
agcggggggcacacagggtg

SEQ ID NO: 9253 - DNA, 20 bp, Artificial Sequence
  Description of Artificial Sequence: Synthetic oligonucleotide
  Target: APOC3; (+) strand; PAM type: NRG; PAM sequence: GGG
gcggggggcacacagggtgg

SEQ ID NO: 9254 - DNA, 20 bp, Artificial Sequence
  Description of Artificial Sequence: Synthetic oligonucleotide
  Target: APOC3; (+) strand; PAM type: NRG; PAM sequence: CGG
gggggcacacagggtggggg

SEQ ID NO: 9255 - DNA, 20 bp, Artificial Sequence
  Description of Artificial Sequence: Synthetic oligonucleotide
  Target: APOC3; (+) strand; PAM type: NRG; PAM sequence: GGG
ggggcacacagggtgggggc

SEQ ID NO: 9256 - DNA, 20 bp, Artificial Sequence
  Description of Artificial Sequence: Synthetic oligonucleotide
  Target: APOC3; (+) strand; PAM type: NRG; PAM sequence: TGG
gcacacagggtgggggcggg

SEQ ID NO: 9257 - DNA, 20 bp, Artificial Sequence
  Description of Artificial Sequence: Synthetic oligonucleotide
  Target: APOC3; (+) strand; PAM type: NRG; PAM sequence: GGG
cacacagggtgggggcgggt

SEQ ID NO: 9258 - DNA, 20 bp, Artificial Sequence
  Description of Artificial Sequence: Synthetic oligonucleotide
  Target: APOC3; (+) strand; PAM type: NRG; PAM sequence: GGG
acacagggtgggggcgggtg

SEQ ID NO: 9259 - DNA, 20 bp, Artificial Sequence
  Description of Artificial Sequence: Synthetic oligonucleotide
  Target: APOC3; (+) strand; PAM type: NRG; PAM sequence: GGG
cacagggtgggggcgggtgg

SEQ ID NO: 9260 - DNA, 20 bp, Artificial Sequence
  Description of Artificial Sequence: Synthetic oligonucleotide
  Target: APOC3; (+) strand; PAM type: NRG; PAM sequence: GGG
acagggtgggggcgggtggg

SEQ ID NO: 9261 - DNA, 20 bp, Artificial Sequence
  Description of Artificial Sequence: Synthetic oligonucleotide
  Target: APOC3; (+) strand; PAM type: NRG; PAM sequence: TGG
gggggcgggtggggggctgc

SEQ ID NO: 9262 - DNA, 20 bp, Artificial Sequence
  Description of Artificial Sequence: Synthetic oligonucleotide
  Target: APOC3; (+) strand; PAM type: NRG; PAM sequence: GGG
ggggcgggtggggggctgct

SEQ ID NO: 9263 - DNA, 20 bp, Artificial Sequence
  Description of Artificial Sequence: Synthetic oligonucleotide
  Target: APOC3; (+) strand; PAM type: NRG; PAM sequence: GAG
cgggtggggggctgctgggt

SEQ ID NO: 9264 - DNA, 20 bp, Artificial Sequence
  Description of Artificial Sequence: Synthetic oligonucleotide
  Target: APOC3; (+) strand; PAM type: NRG; PAM sequence: CAG
gtggggggctgctgggtgag

SEQ ID NO: 9265 - DNA, 20 bp, Artificial Sequence
  Description of Artificial Sequence: Synthetic oligonucleotide
  Target: APOC3; (+) strand; PAM type: NRG; PAM sequence: TGG
gtgagcagcactcgcctgcc

SEQ ID NO: 9266 - DNA, 20 bp, Artificial Sequence
  Description of Artificial Sequence: Synthetic oligonucleotide
  Target: APOC3; (+) strand; PAM type: NRG; PAM sequence: CAG
cgcctgcctggattgaaacc

SEQ ID NO: 9267 - DNA, 20 bp, Artificial Sequence
  Description of Artificial Sequence: Synthetic oligonucleotide
  Target: APOC3; (+) strand; PAM type: NRG; PAM sequence: GAG
cctgcctggattgaaaccca

SEQ ID NO: 9268 - DNA, 20 bp, Artificial Sequence
  Description of Artificial Sequence: Synthetic oligonucleotide
  Target: APOC3; (+) strand; PAM type: NRG; PAM sequence: TGG
cctggattgaaacccagaga

SEQ ID NO: 9269 - DNA, 20 bp, Artificial Sequence
  Description of Artificial Sequence: Synthetic oligonucleotide
  Target: APOC3; (+) strand; PAM type: NRG; PAM sequence: GAG
tggattgaaacccagagatg

SEQ ID NO: 9270 - DNA, 20 bp, Artificial Sequence
  Description of Artificial Sequence: Synthetic oligonucleotide
  Target: APOC3; (+) strand; PAM type: NRG; PAM sequence: AGG
ggattgaaacccagagatgg

SEQ ID NO: 9271 - DNA, 20 bp, Artificial Sequence
  Description of Artificial Sequence: Synthetic oligonucleotide
  Target: APOC3; (+) strand; PAM type: NRG; PAM sequence: TGG
aaacccagagatggaggtgc

SEQ ID NO: 9272 - DNA, 20 bp, Artificial Sequence
  Description of Artificial Sequence: Synthetic oligonucleotide
  Target: APOC3; (+) strand; PAM type: NRG; PAM sequence: GGG
aacccagagatggaggtgct

SEQ ID NO: 9273 - DNA, 20 bp, Artificial Sequence
  Description of Artificial Sequence: Synthetic oligonucleotide
  Target: APOC3; (+) strand; PAM type: NRG; PAM sequence: GAG
cccagagatggaggtgctgg

SEQ ID NO: 9274 - DNA, 20 bp, Artificial Sequence
  Description of Artificial Sequence: Synthetic oligonucleotide
  Target: APOC3; (+) strand; PAM type: NRG; PAM sequence: AGG
ccagagatggaggtgctggg

SEQ ID NO: 9275 - DNA, 20 bp, Artificial Sequence
  Description of Artificial Sequence: Synthetic oligonucleotide
  Target: APOC3; (+) strand; PAM type: NRG; PAM sequence: GGG
cagagatggaggtgctggga

SEQ ID NO: 9276 - DNA, 20 bp, Artificial Sequence
  Description of Artificial Sequence: Synthetic oligonucleotide
  Target: APOC3; (+) strand; PAM type: NRG; PAM sequence: GGG
agagatggaggtgctgggag

SEQ ID NO: 9277 - DNA, 20 bp, Artificial Sequence
  Description of Artificial Sequence: Synthetic oligonucleotide
  Target: APOC3; (+) strand; PAM type: NRG; PAM sequence: GAG
gaggtgctgggaggggctgt

SEQ ID NO: 9278 - DNA, 20 bp, Artificial Sequence
  Description of Artificial Sequence: Synthetic oligonucleotide
  Target: APOC3; (+) strand; PAM type: NRG; PAM sequence: GAG
ggtgctgggaggggctgtga

SEQ ID NO: 9279 - DNA, 20 bp, Artificial Sequence
  Description of Artificial Sequence: Synthetic oligonucleotide
  Target: APOC3; (+) strand; PAM type: NRG; PAM sequence: CAG
tgggaggggctgtgagagct

SEQ ID NO: 9280 - DNA, 20 bp, Artificial Sequence
  Description of Artificial Sequence: Synthetic oligonucleotide
  Target: APOC3; (+) strand; PAM type: NRG; PAM sequence: CAG
tgagagctcagccctgtaac

SEQ ID NO: 9281 - DNA, 20 bp, Artificial Sequence
  Description of Artificial Sequence: Synthetic oligonucleotide
  Target: APOC3; (+) strand; PAM type: NRG; PAM sequence: AGG
gagagctcagccctgtaacc

SEQ ID NO: 9282 - DNA, 20 bp, Artificial Sequence
  Description of Artificial Sequence: Synthetic oligonucleotide
  Target: APOC3; (+) strand; PAM type: NRG; PAM sequence: CGG
gccctgtaaccaggccttgc

SEQ ID NO: 9283 - DNA, 20 bp, Artificial Sequence
  Description of Artificial Sequence: Synthetic oligonucleotide
  Target: APOC3; (+) strand; PAM type: NRG; PAM sequence: GAG
cctgtaaccaggccttgccg

SEQ ID NO: 9284 - DNA, 20 bp, Artificial Sequence
  Description of Artificial Sequence: Synthetic oligonucleotide
  Target: APOC3; (+) strand; PAM type: NRG; PAM sequence: TGG
ttgccggagccactgatgcc

SEQ ID NO: 9285 - DNA, 20 bp, Artificial Sequence
  Description of Artificial Sequence: Synthetic oligonucleotide
  Target: APOC3; (+) strand; PAM type: NRG; PAM sequence: CAG
cctttactccaaacaccccc

SEQ ID NO: 9286 - DNA, 20 bp, Artificial Sequence
  Description of Artificial Sequence: Synthetic oligonucleotide
  Target: APOC3; (+) strand; PAM type: NRG; PAM sequence: AAG
ctccaaacaccccccagccc

SEQ ID NO: 9287 - DNA, 20 bp, Artificial Sequence
  Description of Artificial Sequence: Synthetic oligonucleotide
  Target: APOC3; (+) strand; PAM type: NRG; PAM sequence: AAG
caagccacccacttgttctc

SEQ ID NO: 9288 - DNA, 20 bp, Artificial Sequence
  Description of Artificial Sequence: Synthetic oligonucleotide
  Target: APOC3; (+) strand; PAM type: NRG; PAM sequence: AAG
cccacttgttctcaagtctg

SEQ ID NO: 9289 - DNA, 20 bp, Artificial Sequence
  Description of Artificial Sequence: Synthetic oligonucleotide
  Target: APOC3; (+) strand; PAM type: NRG; PAM sequence: AAG
acttgttctcaagtctgaag

SEQ ID NO: 9290 - DNA, 20 bp, Artificial Sequence
  Description of Artificial Sequence: Synthetic oligonucleotide
  Target: APOC3; (+) strand; PAM type: NRG; PAM sequence: CAG
agcccctcacccctctactc

SEQ ID NO: 9291 - DNA, 20 bp, Artificial Sequence
  Description of Artificial Sequence: Synthetic oligonucleotide
  Target: APOC3; (+) strand; PAM type: NRG; PAM sequence: AGG
gcccctcacccctctactcc

SEQ ID NO: 9292 - DNA, 20 bp, Artificial Sequence
  Description of Artificial Sequence: Synthetic oligonucleotide
  Target: APOC3; (+) strand; PAM type: NRG; PAM sequence: CAG
cctctactccaggctgtgtt

SEQ ID NO: 9293 - DNA, 20 bp, Artificial Sequence
  Description of Artificial Sequence: Synthetic oligonucleotide
  Target: APOC3; (+) strand; PAM type: NRG; PAM sequence: AGG
ctctactccaggctgtgttc

SEQ ID NO: 9294 - DNA, 20 bp, Artificial Sequence
  Description of Artificial Sequence: Synthetic oligonucleotide
  Target: APOC3; (+) strand; PAM type: NRG; PAM sequence: GGG
tctactccaggctgtgttca

SEQ ID NO: 9295 - DNA, 20 bp, Artificial Sequence
  Description of Artificial Sequence: Synthetic oligonucleotide
  Target: APOC3; (+) strand; PAM type: NRG; PAM sequence: TGG
tccaggctgtgttcagggct

SEQ ID NO: 9296 - DNA, 20 bp, Artificial Sequence
  Description of Artificial Sequence: Synthetic oligonucleotide
  Target: APOC3; (+) strand; PAM type: NRG; PAM sequence: GGG
ccaggctgtgttcagggctt

SEQ ID NO: 9297 - DNA, 20 bp, Artificial Sequence
  Description of Artificial Sequence: Synthetic oligonucleotide
  Target: APOC3; (+) strand; PAM type: NRG; PAM sequence: GGG
caggctgtgttcagggcttg

SEQ ID NO: 9298 - DNA, 20 bp, Artificial Sequence
  Description of Artificial Sequence: Synthetic oligonucleotide
  Target: APOC3; (+) strand; PAM type: NRG; PAM sequence: TGG
ctgtgttcagggcttggggc

SEQ ID NO: 9299 - DNA, 20 bp, Artificial Sequence
  Description of Artificial Sequence: Synthetic oligonucleotide
  Target: APOC3; (+) strand; PAM type: NRG; PAM sequence: TGG
tgttcagggcttggggctgg

SEQ ID NO: 9300 - DNA, 20 bp, Artificial Sequence
  Description of Artificial Sequence: Synthetic oligonucleotide
  Target: APOC3; (+) strand; PAM type: NRG; PAM sequence: GAG
ttcagggcttggggctggtg

SEQ ID NO: 9301 - DNA, 20 bp, Artificial Sequence
  Description of Artificial Sequence: Synthetic oligonucleotide
  Target: APOC3; (+) strand; PAM type: NRG; PAM sequence: AGG
tcagggcttggggctggtgg

SEQ ID NO: 9302 - DNA, 20 bp, Artificial Sequence
  Description of Artificial Sequence: Synthetic oligonucleotide
  Target: APOC3; (+) strand; PAM type: NRG; PAM sequence: GGG
cagggcttggggctggtgga

SEQ ID NO: 9303 - DNA, 20 bp, Artificial Sequence
  Description of Artificial Sequence: Synthetic oligonucleotide
  Target: APOC3; (+) strand; PAM type: NRG; PAM sequence: GAG
gggcttggggctggtggagg

SEQ ID NO: 9304 - DNA, 20 bp, Artificial Sequence
  Description of Artificial Sequence: Synthetic oligonucleotide
  Target: APOC3; (+) strand; PAM type: NRG; PAM sequence: AGG
ggcttggggctggtggaggg

SEQ ID NO: 9305 - DNA, 20 bp, Artificial Sequence
  Description of Artificial Sequence: Synthetic oligonucleotide
  Target: APOC3; (+) strand; PAM type: NRG; PAM sequence: GGG
gcttggggctggtggaggga

SEQ ID NO: 9306 - DNA, 20 bp, Artificial Sequence
  Description of Artificial Sequence: Synthetic oligonucleotide
  Target: APOC3; (+) strand; PAM type: NRG; PAM sequence: GGG
cttggggctggtggagggag

SEQ ID NO: 9307 - DNA, 20 bp, Artificial Sequence
  Description of Artificial Sequence: Synthetic oligonucleotide
  Target: APOC3; (+) strand; PAM type: NRG; PAM sequence: CAG
gagggaggggcctgaaattc

SEQ ID NO: 9308 - DNA, 20 bp, Artificial Sequence
  Description of Artificial Sequence: Synthetic oligonucleotide
  Target: APOC3; (+) strand; PAM type: NRG; PAM sequence: AAG
ggcctgaaattccagtgtga

SEQ ID NO: 9309 - DNA, 20 bp, Artificial Sequence
  Description of Artificial Sequence: Synthetic oligonucleotide
  Target: APOC3; (+) strand; PAM type: NRG; PAM sequence: AGG
gcctgaaattccagtgtgaa

SEQ ID NO: 9310 - DNA, 20 bp, Artificial Sequence
  Description of Artificial Sequence: Synthetic oligonucleotide
  Target: APOC3; (+) strand; PAM type: NRG; PAM sequence: GAG
aaattccagtgtgaaaggct

SEQ ID NO: 9311 - DNA, 20 bp, Artificial Sequence
  Description of Artificial Sequence: Synthetic oligonucleotide
  Target: APOC3; (+) strand; PAM type: NRG; PAM sequence: TGG
tccagtgtgaaaggctgaga

SEQ ID NO: 9312 - DNA, 20 bp, Artificial Sequence
  Description of Artificial Sequence: Synthetic oligonucleotide
  Target: APOC3; (+) strand; PAM type: NRG; PAM sequence: GGG
ccagtgtgaaaggctgagat

SEQ ID NO: 9313 - DNA, 20 bp, Artificial Sequence
  Description of Artificial Sequence: Synthetic oligonucleotide
  Target: APOC3; (+) strand; PAM type: NRG; PAM sequence: GAG
tgaaaggctgagatgggccc

SEQ ID NO: 9314 - DNA, 20 bp, Artificial Sequence
  Description of Artificial Sequence: Synthetic oligonucleotide
  Target: APOC3; (+) strand; PAM type: NRG; PAM sequence: AGG
gaaaggctgagatgggcccg

SEQ ID NO: 9315 - DNA, 20 bp, Artificial Sequence
  Description of Artificial Sequence: Synthetic oligonucleotide
  Target: APOC3; (+) strand; PAM type: NRG; PAM sequence: TGG
tgagatgggcccgaggcccc

SEQ ID NO: 9316 - DNA, 20 bp, Artificial Sequence
  Description of Artificial Sequence: Synthetic oligonucleotide
  Target: APOC3; (+) strand; PAM type: NRG; PAM sequence: AAG
gaggcccctggcctatgtcc

SEQ ID NO: 9317 - DNA, 20 bp, Artificial Sequence
  Description of Artificial Sequence: Synthetic oligonucleotide
  Target: APOC3; (+) strand; PAM type: NRG; PAM sequence: CAG
caagccatttcccctctcac

SEQ ID NO: 9318 - DNA, 20 bp, Artificial Sequence
  Description of Artificial Sequence: Synthetic oligonucleotide
  Target: APOC3; (+) strand; PAM type: NRG; PAM sequence: TGG
ccctctcaccagcctctccc

SEQ ID NO: 9319 - DNA, 20 bp, Artificial Sequence
  Description of Artificial Sequence: Synthetic oligonucleotide
  Target: APOC3; (+) strand; PAM type: NRG; PAM sequence: GGG
cctctcaccagcctctccct

SEQ ID NO: 9320 - DNA, 20 bp, Artificial Sequence
  Description of Artificial Sequence: Synthetic oligonucleotide
  Target: APOC3; (+) strand; PAM type: NRG; PAM sequence: GGG
ctctcaccagcctctccctg

SEQ ID NO: 9321 - DNA, 20 bp, Artificial Sequence
  Description of Artificial Sequence: Synthetic oligonucleotide
  Target: APOC3; (+) strand; PAM type: NRG; PAM sequence: GAG
ctcaccagcctctccctggg

SEQ ID NO: 9322 - DNA, 20 bp, Artificial Sequence
  Description of Artificial Sequence: Synthetic oligonucleotide
  Target: APOC3; (+) strand; PAM type: NRG; PAM sequence: CAG
ccagcctctccctggggagc

SEQ ID NO: 9323 - DNA, 20 bp, Artificial Sequence
  Description of Artificial Sequence: Synthetic oligonucleotide
  Target: APOC3; (+) strand; PAM type: NRG; PAM sequence: CAG
cctctccctggggagccagt

SEQ ID NO: 9324 - DNA, 20 bp, Artificial Sequence
  Description of Artificial Sequence: Synthetic oligonucleotide
  Target: APOC3; (+) strand; PAM type: NRG; PAM sequence: TAG
tccctggggagccagtcagc

SEQ ID NO: 9325 - DNA, 20 bp, Artificial Sequence
  Description of Artificial Sequence: Synthetic oligonucleotide
  Target: APOC3; (+) strand; PAM type: NRG; PAM sequence: AGG
ccctggggagccagtcagct

SEQ ID NO: 9326 - DNA, 20 bp, Artificial Sequence
  Description of Artificial Sequence: Synthetic oligonucleotide
  Target: APOC3; (+) strand; PAM type: NRG; PAM sequence: AAG
tggggagccagtcagctagg

SEQ ID NO: 9327 - DNA, 20 bp, Artificial Sequence
  Description of Artificial Sequence: Synthetic oligonucleotide
  Target: APOC3; (+) strand; PAM type: NRG; PAM sequence: AGG
ggggagccagtcagctagga

SEQ ID NO: 9328 - DNA, 20 bp, Artificial Sequence
  Description of Artificial Sequence: Synthetic oligonucleotide
  Target: APOC3; (+) strand; PAM type: NRG; PAM sequence: GAG
ccagtcagctaggaaggaat

SEQ ID NO: 9329 - DNA, 20 bp, Artificial Sequence
  Description of Artificial Sequence: Synthetic oligonucleotide
  Target: APOC3; (+) strand; PAM type: NRG; PAM sequence: AGG
cagtcagctaggaaggaatg

SEQ ID NO: 9330 - DNA, 20 bp, Artificial Sequence
  Description of Artificial Sequence: Synthetic oligonucleotide
  Target: APOC3; (+) strand; PAM type: NRG; PAM sequence: GGG
agtcagctaggaaggaatga

SEQ ID NO: 9331 - DNA, 20 bp, Artificial Sequence
  Description of Artificial Sequence: Synthetic oligonucleotide
  Target: APOC3; (+) strand; PAM type: NRG; PAM sequence: CAG
aggaaggaatgagggctccc

SEQ ID NO: 9332 - DNA, 20 bp, Artificial Sequence
  Description of Artificial Sequence: Synthetic oligonucleotide
  Target: APOC3; (+) strand; PAM type: NRG; PAM sequence: AGG
ggaaggaatgagggctcccc

SEQ ID NO: 9333 - DNA, 20 bp, Artificial Sequence
  Description of Artificial Sequence: Synthetic oligonucleotide
  Target: APOC3; (+) strand; PAM type: NRG; PAM sequence: CAG
gggctccccaggcccacccc

SEQ ID NO: 9334 - DNA, 20 bp, Artificial Sequence
  Description of Artificial Sequence: Synthetic oligonucleotide
  Target: APOC3; (+) strand; PAM type: NRG; PAM sequence: GAG
caggcccacccccagttcct

SEQ ID NO: 9335 - DNA, 20 bp, Artificial Sequence
  Description of Artificial Sequence: Synthetic oligonucleotide
  Target: APOC3; (+) strand; PAM type: NRG; PAM sequence: TGG
ccccagttcctgagctcatc

SEQ ID NO: 9336 - DNA, 20 bp, Artificial Sequence
  Description of Artificial Sequence: Synthetic oligonucleotide
  Target: APOC3; (+) strand; PAM type: NRG; PAM sequence: GGG
cccagttcctgagctcatct

SEQ ID NO: 9337 - DNA, 20 bp, Artificial Sequence
  Description of Artificial Sequence: Synthetic oligonucleotide
  Target: APOC3; (+) strand; PAM type: NRG; PAM sequence: CAG
tcctgagctcatctgggctg

SEQ ID NO: 9338 - DNA, 20 bp, Artificial Sequence
  Description of Artificial Sequence: Synthetic oligonucleotide
  Target: APOC3; (+) strand; PAM type: NRG; PAM sequence: AGG
cctgagctcatctgggctgc

SEQ ID NO: 9339 - DNA, 20 bp, Artificial Sequence
  Description of Artificial Sequence: Synthetic oligonucleotide
  Target: APOC3; (+) strand; PAM type: NRG; PAM sequence: GGG
ctgagctcatctgggctgca

SEQ ID NO: 9340 - DNA, 20 bp, Artificial Sequence
  Description of Artificial Sequence: Synthetic oligonucleotide
  Target: APOC3; (+) strand; PAM type: NRG; PAM sequence: TGG
gctcatctgggctgcagggc

SEQ ID NO: 9341 - DNA, 20 bp, Artificial Sequence
  Description of Artificial Sequence: Synthetic oligonucleotide
  Target: APOC3; (+) strand; PAM type: NRG; PAM sequence: CGG
catctgggctgcagggctgg

SEQ ID NO: 9342 - DNA, 20 bp, Artificial Sequence
  Description of Artificial Sequence: Synthetic oligonucleotide
  Target: APOC3; (+) strand; PAM type: NRG; PAM sequence: GGG
atctgggctgcagggctggc

SEQ ID NO: 9343 - DNA, 20 bp, Artificial Sequence
  Description of Artificial Sequence: Synthetic oligonucleotide
  Target: APOC3; (+) strand; PAM type: NRG; PAM sequence: CAG
gggctgcagggctggcggga

SEQ ID NO: 9344 - DNA, 20 bp, Artificial Sequence
  Description of Artificial Sequence: Synthetic oligonucleotide
  Target: APOC3; (+) strand; PAM type: NRG; PAM sequence: CAG
ctgcagggctggcgggacag

SEQ ID NO: 9345 - DNA, 20 bp, Artificial Sequence
  Description of Artificial Sequence: Synthetic oligonucleotide
  Target: APOC3; (+) strand; PAM type: NRG; PAM sequence: TGG
gggctggcgggacagcagcg

SEQ ID NO: 9346 - DNA, 20 bp, Artificial Sequence
  Description of Artificial Sequence: Synthetic oligonucleotide
  Target: APOC3; (+) strand; PAM type: NRG; PAM sequence: CAG
gcgggacagcagcgtggact

SEQ ID NO: 9347 - DNA, 20 bp, Artificial Sequence
  Description of Artificial Sequence: Synthetic oligonucleotide
  Target: APOC3; (+) strand; PAM type: NRG; PAM sequence: TAG
gcagcgtggactcagtctcc

SEQ ID NO: 9348 - DNA, 20 bp, Artificial Sequence
  Description of Artificial Sequence: Synthetic oligonucleotide
  Target: APOC3; (+) strand; PAM type: NRG; PAM sequence: AGG
cagcgtggactcagtctcct

SEQ ID NO: 9349 - DNA, 20 bp, Artificial Sequence
  Description of Artificial Sequence: Synthetic oligonucleotide
  Target: APOC3; (+) strand; PAM type: NRG; PAM sequence: GGG
agcgtggactcagtctccta

SEQ ID NO: 9350 - DNA, 20 bp, Artificial Sequence
  Description of Artificial Sequence: Synthetic oligonucleotide
  Target: APOC3; (+) strand; PAM type: NRG; PAM sequence: TGG
tcccgcccgcttgctgcatc

SEQ ID NO: 9351 - DNA, 20 bp, Artificial Sequence
  Description of Artificial Sequence: Synthetic oligonucleotide
  Target: APOC3; (+) strand; PAM type: NRG; PAM sequence: CAG
tgcatctggacaccctgcct

SEQ ID NO: 9352 - DNA, 20 bp, Artificial Sequence
  Description of Artificial Sequence: Synthetic oligonucleotide
  Target: APOC3; (+) strand; PAM type: NRG; PAM sequence: AGG
gcatctggacaccctgcctc

SEQ ID NO: 9353 - DNA, 20 bp, Artificial Sequence
  Description of Artificial Sequence: Synthetic oligonucleotide
  Target: APOC3; (+) strand; PAM type: NRG; PAM sequence: TGG
cctcaggccctcatctccac

SEQ ID NO: 9354 - DNA, 20 bp, Artificial Sequence
  Description of Artificial Sequence: Synthetic oligonucleotide
  Target: APOC3; (+) strand; PAM type: NRG; PAM sequence: CAG
aggccctcatctccactggt

SEQ ID NO: 9355 - DNA, 20 bp, Artificial Sequence
  Description of Artificial Sequence: Synthetic oligonucleotide
  Target: APOC3; (+) strand; PAM type: NRG; PAM sequence: CAG
ccctcatctccactggtcag

SEQ ID NO: 9356 - DNA, 20 bp, Artificial Sequence
  Description of Artificial Sequence: Synthetic oligonucleotide
  Target: APOC3; (+) strand; PAM type: NRG; PAM sequence: AGG
cctcatctccactggtcagc

SEQ ID NO: 9357 - DNA, 20 bp, Artificial Sequence
  Description of Artificial Sequence: Synthetic oligonucleotide
  Target: APOC3; (+) strand; PAM type: NRG; PAM sequence: CAG
gtcagcaggtgacctttgcc

SEQ ID NO: 9358 - DNA, 20 bp, Artificial Sequence
  Description of Artificial Sequence: Synthetic oligonucleotide
  Target: APOC3; (+) strand; PAM type: NRG; PAM sequence: TGG
gtgacctttgcccagcgccc

SEQ ID NO: 9359 - DNA, 20 bp, Artificial Sequence
  Description of Artificial Sequence: Synthetic oligonucleotide
  Target: APOC3; (+) strand; PAM type: NRG; PAM sequence: GGG
tgacctttgcccagcgccct

SEQ ID NO: 9360 - DNA, 20 bp, Artificial Sequence
  Description of Artificial Sequence: Synthetic oligonucleotide
  Target: APOC3; (+) strand; PAM type: NRG; PAM sequence: CAG
tgcccagcgccctgggtcct

SEQ ID NO: 9361 - DNA, 20 bp, Artificial Sequence
  Description of Artificial Sequence: Synthetic oligonucleotide
  Target: APOC3; (+) strand; PAM type: NRG; PAM sequence: TGG
gtcctcagtgcctgctgccc

SEQ ID NO: 9362 - DNA, 20 bp, Artificial Sequence
  Description of Artificial Sequence: Synthetic oligonucleotide
  Target: APOC3; (+) strand; PAM type: NRG; PAM sequence: GAG
cctcagtgcctgctgccctg

SEQ ID NO: 9363 - DNA, 20 bp, Artificial Sequence
  Description of Artificial Sequence: Synthetic oligonucleotide
  Target: APOC3; (+) strand; PAM type: NRG; PAM sequence: CAG
gccctggagatgatataaaa

SEQ ID NO: 9364 - DNA, 20 bp, Artificial Sequence
  Description of Artificial Sequence: Synthetic oligonucleotide
  Target: APOC3; (+) strand; PAM type: NRG; PAM sequence: AGG
ccctggagatgatataaaac

SEQ ID NO: 9365 - DNA, 20 bp, Artificial Sequence
  Description of Artificial Sequence: Synthetic oligonucleotide
  Target: APOC3; (+) strand; PAM type: NRG; PAM sequence: CAG
ggagatgatataaaacaggt

SEQ ID NO: 9366 - DNA, 20 bp, Artificial Sequence
  Description of Artificial Sequence: Synthetic oligonucleotide
  Target: APOC3; (+) strand; PAM type: NRG; PAM sequence: CAG
aaccctcctgcctgtctgct

SEQ ID NO: 9367 - DNA, 20 bp, Artificial Sequence
  Description of Artificial Sequence: Synthetic oligonucleotide
  Target: APOC3; (+) strand; PAM type: NRG; PAM sequence: TAG
ctgtctgctcagttcatccc

SEQ ID NO: 9368 - DNA, 20 bp, Artificial Sequence
  Description of Artificial Sequence: Synthetic oligonucleotide
  Target: APOC3; (+) strand; PAM type: NRG; PAM sequence: GAG
gtctgctcagttcatcccta

SEQ ID NO: 9369 - DNA, 20 bp, Artificial Sequence
  Description of Artificial Sequence: Synthetic oligonucleotide
  Target: APOC3; (+) strand; PAM type: NRG; PAM sequence: AGG
tctgctcagttcatccctag

SEQ ID NO: 9370 - DNA, 20 bp, Artificial Sequence
  Description of Artificial Sequence: Synthetic oligonucleotide
  Target: APOC3; (+) strand; PAM type: NRG; PAM sequence: CAG
gctcagttcatccctagagg

SEQ ID NO: 9371 - DNA, 20 bp, Artificial Sequence
  Description of Artificial Sequence: Synthetic oligonucleotide
  Target: APOC3; (+) strand; PAM type: NRG; PAM sequence: CAG
atccctagaggcagctgctc

SEQ ID NO: 9372 - DNA, 20 bp, Artificial Sequence
  Description of Artificial Sequence: Synthetic oligonucleotide
  Target: APOC3; (+) strand; PAM type: NRG; PAM sequence: AGG
tccctagaggcagctgctcc

SEQ ID NO: 9373 - DNA, 20 bp, Artificial Sequence
  Description of Artificial Sequence: Synthetic oligonucleotide
  Target: APOC3; (+) strand; PAM type: NRG; PAM sequence: TGG
ctgctccaggtaatgccctc

SEQ ID NO: 9374 - DNA, 20 bp, Artificial Sequence
  Description of Artificial Sequence: Synthetic oligonucleotide
  Target: APOC3; (+) strand; PAM type: NRG; PAM sequence: GGG
tgctccaggtaatgccctct

SEQ ID NO: 9375 - DNA, 20 bp, Artificial Sequence
  Description of Artificial Sequence: Synthetic oligonucleotide
  Target: APOC3; (+) strand; PAM type: NRG; PAM sequence: GGG
gctccaggtaatgccctctg

SEQ ID NO: 9376 - DNA, 20 bp, Artificial Sequence
  Description of Artificial Sequence: Synthetic oligonucleotide
  Target: APOC3; (+) strand; PAM type: NRG; PAM sequence: GAG
tccaggtaatgccctctggg

SEQ ID NO: 9377 - DNA, 20 bp, Artificial Sequence
  Description of Artificial Sequence: Synthetic oligonucleotide
  Target: APOC3; (+) strand; PAM type: NRG; PAM sequence: AGG
ccaggtaatgccctctgggg

SEQ ID NO: 9378 - DNA, 20 bp, Artificial Sequence
  Description of Artificial Sequence: Synthetic oligonucleotide
  Target: APOC3; (+) strand; PAM type: NRG; PAM sequence: GGG
caggtaatgccctctgggga

SEQ ID NO: 9379 - DNA, 20 bp, Artificial Sequence
  Description of Artificial Sequence: Synthetic oligonucleotide
  Target: APOC3; (+) strand; PAM type: NRG; PAM sequence: GGG
aggtaatgccctctggggag

SEQ ID NO: 9380 - DNA, 20 bp, Artificial Sequence
  Description of Artificial Sequence: Synthetic oligonucleotide
  Target: APOC3; (+) strand; PAM type: NRG; PAM sequence: AAG
aatgccctctggggagggga

SEQ ID NO: 9381 - DNA, 20 bp, Artificial Sequence
  Description of Artificial Sequence: Synthetic oligonucleotide
  Target: APOC3; (+) strand; PAM type: NRG; PAM sequence: GAG
tgccctctggggaggggaaa

SEQ ID NO: 9382 - DNA, 20 bp, Artificial Sequence
  Description of Artificial Sequence: Synthetic oligonucleotide
  Target: APOC3; (+) strand; PAM type: NRG; PAM sequence: AGG
gccctctggggaggggaaag

SEQ ID NO: 9383 - DNA, 20 bp, Artificial Sequence
  Description of Artificial Sequence: Synthetic oligonucleotide
  Target: APOC3; (+) strand; PAM type: NRG; PAM sequence: GAG
cctctggggaggggaaagag

SEQ ID NO: 9384 - DNA, 20 bp, Artificial Sequence
  Description of Artificial Sequence: Synthetic oligonucleotide
  Target: APOC3; (+) strand; PAM type: NRG; PAM sequence: AGG
ctctggggaggggaaagagg

SEQ ID NO: 9385 - DNA, 20 bp, Artificial Sequence
  Description of Artificial Sequence: Synthetic oligonucleotide
  Target: APOC3; (+) strand; PAM type: NRG; PAM sequence: GGG
tctggggaggggaaagagga

SEQ ID NO: 9386 - DNA, 20 bp, Artificial Sequence
  Description of Artificial Sequence: Synthetic oligonucleotide
  Target: APOC3; (+) strand; PAM type: NRG; PAM sequence: GGG
ctggggaggggaaagaggag

SEQ ID NO: 9387 - DNA, 20 bp, Artificial Sequence
  Description of Artificial Sequence: Synthetic oligonucleotide
  Target: APOC3; (+) strand; PAM type: NRG; PAM sequence: GAG
ggggaggggaaagaggaggg

SEQ ID NO: 9388 - DNA, 20 bp, Artificial Sequence
  Description of Artificial Sequence: Synthetic oligonucleotide
  Target: APOC3; (+) strand; PAM type: NRG; PAM sequence: AGG
gggaggggaaagaggagggg

SEQ ID NO: 9389 - DNA, 20 bp, Artificial Sequence
  Description of Artificial Sequence: Synthetic oligonucleotide
  Target: APOC3; (+) strand; PAM type: NRG; PAM sequence: GAG
gaggggaaagaggaggggag

SEQ ID NO: 9390 - DNA, 20 bp, Artificial Sequence
  Description of Artificial Sequence: Synthetic oligonucleotide
  Target: APOC3; (+) strand; PAM type: NRG; PAM sequence: AGG
aggggaaagaggaggggagg

SEQ ID NO: 9391 - DNA, 20 bp, Artificial Sequence
  Description of Artificial Sequence: Synthetic oligonucleotide
  Target: APOC3; (+) strand; PAM type: NRG; PAM sequence: AAG
aagaggaggggaggaggatg

SEQ ID NO: 9392 - DNA, 20 bp, Artificial Sequence
  Description of Artificial Sequence: Synthetic oligonucleotide
  Target: APOC3; (+) strand; PAM type: NRG; PAM sequence: GAG
gaggaggggaggaggatgaa

SEQ ID NO: 9393 - DNA, 20 bp, Artificial Sequence
  Description of Artificial Sequence: Synthetic oligonucleotide
  Target: APOC3; (+) strand; PAM type: NRG; PAM sequence: AGG
aggaggggaggaggatgaag

SEQ ID NO: 9394 - DNA, 20 bp, Artificial Sequence
  Description of Artificial Sequence: Synthetic oligonucleotide
  Target: APOC3; (+) strand; PAM type: NRG; PAM sequence: GGG
ggaggggaggaggatgaaga

SEQ ID NO: 9395 - DNA, 20 bp, Artificial Sequence
  Description of Artificial Sequence: Synthetic oligonucleotide
  Target: APOC3; (+) strand; PAM type: NRG; PAM sequence: GGG
gaggggaggaggatgaagag

SEQ ID NO: 9396 - DNA, 20 bp, Artificial Sequence
  Description of Artificial Sequence: Synthetic oligonucleotide
  Target: APOC3; (+) strand; PAM type: NRG; PAM sequence: AAG
ggaggaggatgaagaggggc

SEQ ID NO: 9397 - DNA, 20 bp, Artificial Sequence
  Description of Artificial Sequence: Synthetic oligonucleotide
  Target: APOC3; (+) strand; PAM type: NRG; PAM sequence: GAG
aggaggatgaagaggggcaa

SEQ ID NO: 9398 - DNA, 20 bp, Artificial Sequence
  Description of Artificial Sequence: Synthetic oligonucleotide
  Target: APOC3; (+) strand; PAM type: NRG; PAM sequence: AGG
ggaggatgaagaggggcaag

SEQ ID NO: 9399 - DNA, 20 bp, Artificial Sequence
  Description of Artificial Sequence: Synthetic oligonucleotide
  Target: APOC3; (+) strand; PAM type: NRG; PAM sequence: GAG
aggatgaagaggggcaagag

SEQ ID NO: 9400 - DNA, 20 bp, Artificial Sequence
  Description of Artificial Sequence: Synthetic oligonucleotide
  Target: APOC3; (+) strand; PAM type: NRG; PAM sequence: CAG
ggcaagaggagctccctgcc

SEQ ID NO: 9401 - DNA, 20 bp, Artificial Sequence
  Description of Artificial Sequence: Synthetic oligonucleotide
  Target: APOC3; (+) strand; PAM type: NRG; PAM sequence: CAG
gaggagctccctgcccagcc

SEQ ID NO: 9402 - DNA, 20 bp, Artificial Sequence
  Description of Artificial Sequence: Synthetic oligonucleotide
  Target: APOC3; (+) strand; PAM type: NRG; PAM sequence: CAG
agctccctgcccagcccagc

SEQ ID NO: 9403 - DNA, 20 bp, Artificial Sequence
  Description of Artificial Sequence: Synthetic oligonucleotide
  Target: APOC3; (+) strand; PAM type: NRG; PAM sequence: AAG
ccctgcccagcccagccagc

SEQ ID NO: 9404 - DNA, 20 bp, Artificial Sequence
  Description of Artificial Sequence: Synthetic oligonucleotide
  Target: APOC3; (+) strand; PAM type: NRG; PAM sequence: TGG
cccagcccagccagcaagcc

SEQ ID NO: 9405 - DNA, 20 bp, Artificial Sequence
  Description of Artificial Sequence: Synthetic oligonucleotide
  Target: APOC3; (+) strand; PAM type: NRG; PAM sequence: GAG
cagcccagccagcaagcctg

SEQ ID NO: 9406 - DNA, 20 bp, Artificial Sequence
  Description of Artificial Sequence: Synthetic oligonucleotide
  Target: APOC3; (+) strand; PAM type: NRG; PAM sequence: AAG
cccagccagcaagcctggag

SEQ ID NO: 9407 - DNA, 20 bp, Artificial Sequence
  Description of Artificial Sequence: Synthetic oligonucleotide
  Target: APOC3; (+) strand; PAM type: NRG; PAM sequence: TAG
aagcctggagaagcacttgc

SEQ ID NO: 9408 - DNA, 20 bp, Artificial Sequence
  Description of Artificial Sequence: Synthetic oligonucleotide
  Target: APOC3; (+) strand; PAM type: NRG; PAM sequence: GAG
gcctggagaagcacttgcta

SEQ ID NO: 9409 - DNA, 20 bp, Artificial Sequence
  Description of Artificial Sequence: Synthetic oligonucleotide
  Target: APOC3; (+) strand; PAM type: NRG; PAM sequence: AAG
gagaagcacttgctagagct

SEQ ID NO: 9410 - DNA, 20 bp, Artificial Sequence
  Description of Artificial Sequence: Synthetic oligonucleotide
  Target: APOC3; (+) strand; PAM type: NRG; PAM sequence: AGG
agaagcacttgctagagcta

SEQ ID NO: 9411 - DNA, 20 bp, Artificial Sequence
  Description of Artificial Sequence: Synthetic oligonucleotide
  Target: APOC3; (+) strand; PAM type: NRG; PAM sequence: AAG
agcacttgctagagctaagg

SEQ ID NO: 9412 - DNA, 20 bp, Artificial Sequence
  Description of Artificial Sequence: Synthetic oligonucleotide
  Target: APOC3; (+) strand; PAM type: NRG; PAM sequence: CGG
tgctagagctaaggaagcct

SEQ ID NO: 9413 - DNA, 20 bp, Artificial Sequence
  Description of Artificial Sequence: Synthetic oligonucleotide
  Target: APOC3; (+) strand; PAM type: NRG; PAM sequence: GAG
ctagagctaaggaagcctcg

SEQ ID NO: 9414 - DNA, 20 bp, Artificial Sequence
  Description of Artificial Sequence: Synthetic oligonucleotide
  Target: APOC3; (+) strand; PAM type: NRG; PAM sequence: TGG
agctaaggaagcctcggagc

SEQ ID NO: 9415 - DNA, 20 bp, Artificial Sequence
  Description of Artificial Sequence: Synthetic oligonucleotide
  Target: APOC3; (+) strand; PAM type: NRG; PAM sequence: CGG
aaggaagcctcggagctgga

SEQ ID NO: 9416 - DNA, 20 bp, Artificial Sequence
  Description of Artificial Sequence: Synthetic oligonucleotide
  Target: APOC3; (+) strand; PAM type: NRG; PAM sequence: GGG
aggaagcctcggagctggac

SEQ ID NO: 9417 - DNA, 20 bp, Artificial Sequence
  Description of Artificial Sequence: Synthetic oligonucleotide
  Target: APOC3; (+) strand; PAM type: NRG; PAM sequence: AAG
ccacccctcatcataacctg

SEQ ID NO: 9418 - DNA, 20 bp, Artificial Sequence
  Description of Artificial Sequence: Synthetic oligonucleotide
  Target: APOC3; (+) strand; PAM type: NRG; PAM sequence: TGG
tcatcataacctgaagaaca

SEQ ID NO: 9419 - DNA, 20 bp, Artificial Sequence
  Description of Artificial Sequence: Synthetic oligonucleotide
  Target: APOC3; (+) strand; PAM type: NRG; PAM sequence: GAG
atcataacctgaagaacatg

SEQ ID NO: 9420 - DNA, 20 bp, Artificial Sequence
  Description of Artificial Sequence: Synthetic oligonucleotide
  Target: APOC3; (+) strand; PAM type: NRG; PAM sequence: AGG
tcataacctgaagaacatgg

SEQ ID NO: 9421 - DNA, 20 bp, Artificial Sequence
  Description of Artificial Sequence: Synthetic oligonucleotide
  Target: APOC3; (+) strand; PAM type: NRG; PAM sequence: CGG
acctgaagaacatggaggcc

SEQ ID NO: 9422 - DNA, 20 bp, Artificial Sequence
  Description of Artificial Sequence: Synthetic oligonucleotide
  Target: APOC3; (+) strand; PAM type: NRG; PAM sequence: GGG
cctgaagaacatggaggccc

SEQ ID NO: 9423 - DNA, 20 bp, Artificial Sequence
  Description of Artificial Sequence: Synthetic oligonucleotide
  Target: APOC3; (+) strand; PAM type: NRG; PAM sequence: GAG
tgaagaacatggaggcccgg

SEQ ID NO: 9424 - DNA, 20 bp, Artificial Sequence
  Description of Artificial Sequence: Synthetic oligonucleotide
  Target: APOC3; (+) strand; PAM type: NRG; PAM sequence: AGG
gaagaacatggaggcccggg

SEQ ID NO: 9425 - DNA, 20 bp, Artificial Sequence
  Description of Artificial Sequence: Synthetic oligonucleotide
  Target: APOC3; (+) strand; PAM type: NRG; PAM sequence: GGG
aagaacatggaggcccggga

SEQ ID NO: 9426 - DNA, 20 bp, Artificial Sequence
  Description of Artificial Sequence: Synthetic oligonucleotide
  Target: APOC3; (+) strand; PAM type: NRG; PAM sequence: GGG
agaacatggaggcccgggag

SEQ ID NO: 9427 - DNA, 20 bp, Artificial Sequence
  Description of Artificial Sequence: Synthetic oligonucleotide
  Target: APOC3; (+) strand; PAM type: NRG; PAM sequence: AAG
ggaggggtgtcacttgccca

SEQ ID NO: 9428 - DNA, 20 bp, Artificial Sequence
  Description of Artificial Sequence: Synthetic oligonucleotide
  Target: APOC3; (+) strand; PAM type: NRG; PAM sequence: CAG
gtcacttgcccaaagctaca

SEQ ID NO: 9429 - DNA, 20 bp, Artificial Sequence
  Description of Artificial Sequence: Synthetic oligonucleotide
  Target: APOC3; (+) strand; PAM type: NRG; PAM sequence: AGG
tcacttgcccaaagctacac

SEQ ID NO: 9430 - DNA, 20 bp, Artificial Sequence
  Description of Artificial Sequence: Synthetic oligonucleotide
  Target: APOC3; (+) strand; PAM type: NRG; PAM sequence: GGG
cacttgcccaaagctacaca

SEQ ID NO: 9431 - DNA, 20 bp, Artificial Sequence
  Description of Artificial Sequence: Synthetic oligonucleotide
  Target: APOC3; (+) strand; PAM type: NRG; PAM sequence: GGG
acttgcccaaagctacacag

SEQ ID NO: 9432 - DNA, 20 bp, Artificial Sequence
  Description of Artificial Sequence: Synthetic oligonucleotide
  Target: APOC3; (+) strand; PAM type: NRG; PAM sequence: GGG
cttgcccaaagctacacagg

SEQ ID NO: 9433 - DNA, 20 bp, Artificial Sequence
  Description of Artificial Sequence: Synthetic oligonucleotide
  Target: APOC3; (+) strand; PAM type: NRG; PAM sequence: TGG
gcccaaagctacacaggggg

SEQ ID NO: 9434 - DNA, 20 bp, Artificial Sequence
  Description of Artificial Sequence: Synthetic oligonucleotide
  Target: APOC3; (+) strand; PAM type: NRG; PAM sequence: GGG
cccaaagctacacagggggt

SEQ ID NO: 9435 - DNA, 20 bp, Artificial Sequence
  Description of Artificial Sequence: Synthetic oligonucleotide
  Target: APOC3; (+) strand; PAM type: NRG; PAM sequence: GGG
ccaaagctacacagggggtg

SEQ ID NO: 9436 - DNA, 20 bp, Artificial Sequence
  Description of Artificial Sequence: Synthetic oligonucleotide
  Target: APOC3; (+) strand; PAM type: NRG; PAM sequence: TGG
agctacacagggggtggggc

SEQ ID NO: 9437 - DNA, 20 bp, Artificial Sequence
  Description of Artificial Sequence: Synthetic oligonucleotide
  Target: APOC3; (+) strand; PAM type: NRG; PAM sequence: AAG
tacacagggggtggggctgg

SEQ ID NO: 9438 - DNA, 20 bp, Artificial Sequence
  Description of Artificial Sequence: Synthetic oligonucleotide
  Target: APOC3; (+) strand; PAM type: NRG; PAM sequence: TGG
acagggggtggggctggaag

SEQ ID NO: 9439 - DNA, 20 bp, Artificial Sequence
  Description of Artificial Sequence: Synthetic oligonucleotide
  Target: APOC3; (+) strand; PAM type: NRG; PAM sequence: AAG
gtggggctggaagtggctcc

SEQ ID NO: 9440 - DNA, 20 bp, Artificial Sequence
  Description of Artificial Sequence: Synthetic oligonucleotide
  Target: APOC3; (+) strand; PAM type: NRG; PAM sequence: CAG
gctggaagtggctccaagtg

SEQ ID NO: 9441 - DNA, 20 bp, Artificial Sequence
  Description of Artificial Sequence: Synthetic oligonucleotide
  Target: APOC3; (+) strand; PAM type: NRG; PAM sequence: AGG
ctggaagtggctccaagtgc

SEQ ID NO: 9442 - DNA, 20 bp, Artificial Sequence
  Description of Artificial Sequence: Synthetic oligonucleotide
  Target: APOC3; (+) strand; PAM type: NRG; PAM sequence: CAG
caggttcccccctcattctt

SEQ ID NO: 9443 - DNA, 20 bp, Artificial Sequence
  Description of Artificial Sequence: Synthetic oligonucleotide
  Target: APOC3; (+) strand; PAM type: NRG; PAM sequence: AGG
aggttcccccctcattcttc

SEQ ID NO: 9444 - DNA, 20 bp, Artificial Sequence
  Description of Artificial Sequence: Synthetic oligonucleotide
  Target: APOC3; (+) strand; PAM type: NRG; PAM sequence: TAG
cccccctcattcttcaggct

SEQ ID NO: 9445 - DNA, 20 bp, Artificial Sequence
  Description of Artificial Sequence: Synthetic oligonucleotide
  Target: APOC3; (+) strand; PAM type: NRG; PAM sequence: AGG
ccccctcattcttcaggctt

SEQ ID NO: 9446 - DNA, 20 bp, Artificial Sequence
  Description of Artificial Sequence: Synthetic oligonucleotide
  Target: APOC3; (+) strand; PAM type: NRG; PAM sequence: GGG
cccctcattcttcaggctta

SEQ ID NO: 9447 - DNA, 20 bp, Artificial Sequence
  Description of Artificial Sequence: Synthetic oligonucleotide
  Target: APOC3; (+) strand; PAM type: NRG; PAM sequence: TGG
tcattcttcaggcttagggc

SEQ ID NO: 9448 - DNA, 20 bp, Artificial Sequence
  Description of Artificial Sequence: Synthetic oligonucleotide
  Target: APOC3; (+) strand; PAM type: NRG; PAM sequence: GAG
attcttcaggcttagggctg

SEQ ID NO: 9449 - DNA, 20 bp, Artificial Sequence
  Description of Artificial Sequence: Synthetic oligonucleotide
  Target: APOC3; (+) strand; PAM type: NRG; PAM sequence: AGG
ttcttcaggcttagggctgg

SEQ ID NO: 9450 - DNA, 20 bp, Artificial Sequence
  Description of Artificial Sequence: Synthetic oligonucleotide
  Target: APOC3; (+) strand; PAM type: NRG; PAM sequence: AAG
ttcaggcttagggctggagg

SEQ ID NO: 9451 - DNA, 20 bp, Artificial Sequence
  Description of Artificial Sequence: Synthetic oligonucleotide
  Target: APOC3; (+) strand; PAM type: NRG; PAM sequence: TAG
cttagggctggaggaagcct

SEQ ID NO: 9452 - DNA, 20 bp, Artificial Sequence
  Description of Artificial Sequence: Synthetic oligonucleotide
  Target: APOC3; (+) strand; PAM type: NRG; PAM sequence: CAG
gggctggaggaagccttaga

SEQ ID NO: 9453 - DNA, 20 bp, Artificial Sequence
  Description of Artificial Sequence: Synthetic oligonucleotide
  Target: APOC3; (+) strand; PAM type: NRG; PAM sequence: CAG
ggaggaagccttagacagcc

SEQ ID NO: 9454 - DNA, 20 bp, Artificial Sequence
  Description of Artificial Sequence: Synthetic oligonucleotide
  Target: APOC3; (+) strand; PAM type: NRG; PAM sequence: CAG
tagacagcccagtcctaccc

SEQ ID NO: 9455 - DNA, 20 bp, Artificial Sequence
  Description of Artificial Sequence: Synthetic oligonucleotide
  Target: APOC3; (+) strand; PAM type: NRG; PAM sequence: CAG
cagcccagtcctaccccaga

SEQ ID NO: 9456 - DNA, 20 bp, Artificial Sequence
  Description of Artificial Sequence: Synthetic oligonucleotide
  Target: APOC3; (+) strand; PAM type: NRG; PAM sequence: AGG
agcccagtcctaccccagac

SEQ ID NO: 9457 - DNA, 20 bp, Artificial Sequence
  Description of Artificial Sequence: Synthetic oligonucleotide
  Target: APOC3; (+) strand; PAM type: NRG; PAM sequence: GGG
gcccagtcctaccccagaca

SEQ ID NO: 9458 - DNA, 20 bp, Artificial Sequence
  Description of Artificial Sequence: Synthetic oligonucleotide
  Target: APOC3; (+) strand; PAM type: NRG; PAM sequence: GAG
ctaccccagacagggaaact

SEQ ID NO: 9459 - DNA, 20 bp, Artificial Sequence
  Description of Artificial Sequence: Synthetic oligonucleotide
  Target: APOC3; (+) strand; PAM type: NRG; PAM sequence: AGG
taccccagacagggaaactg

SEQ ID NO: 9460 - DNA, 20 bp, Artificial Sequence
  Description of Artificial Sequence: Synthetic oligonucleotide
  Target: APOC3; (+) strand; PAM type: NRG; PAM sequence: TGG
cagacagggaaactgaggcc

SEQ ID NO: 9461 - DNA, 20 bp, Artificial Sequence
  Description of Artificial Sequence: Synthetic oligonucleotide
  Target: APOC3; (+) strand; PAM type: NRG; PAM sequence: GAG
gacagggaaactgaggcctg

SEQ ID NO: 9462 - DNA, 20 bp, Artificial Sequence
  Description of Artificial Sequence: Synthetic oligonucleotide
  Target: APOC3; (+) strand; PAM type: NRG; PAM sequence: GAG
cagggaaactgaggcctgga

SEQ ID NO: 9463 - DNA, 20 bp, Artificial Sequence
  Description of Artificial Sequence: Synthetic oligonucleotide
  Target: APOC3; (+) strand; PAM type: NRG; PAM sequence: AGG
agggaaactgaggcctggag

SEQ ID NO: 9464 - DNA, 20 bp, Artificial Sequence
  Description of Artificial Sequence: Synthetic oligonucleotide
  Target: APOC3; (+) strand; PAM type: NRG; PAM sequence: GGG
gggaaactgaggcctggaga

SEQ ID NO: 9465 - DNA, 20 bp, Artificial Sequence
  Description of Artificial Sequence: Synthetic oligonucleotide
  Target: APOC3; (+) strand; PAM type: NRG; PAM sequence: CAG
aactgaggcctggagagggc

SEQ ID NO: 9466 - DNA, 20 bp, Artificial Sequence
  Description of Artificial Sequence: Synthetic oligonucleotide
  Target: APOC3; (+) strand; PAM type: NRG; PAM sequence: AAG
agagggccagaaatcaccca

SEQ ID NO: 9467 - DNA, 20 bp, Artificial Sequence
  Description of Artificial Sequence: Synthetic oligonucleotide
  Target: APOC3; (+) strand; PAM type: NRG; PAM sequence: CAG
agaaatcacccaaagacaca

SEQ ID NO: 9468 - DNA, 20 bp, Artificial Sequence
  Description of Artificial Sequence: Synthetic oligonucleotide
  Target: APOC3; (+) strand; PAM type: NRG; PAM sequence: TGG
cccaaagacacacagcatgt

SEQ ID NO: 9469 - DNA, 20 bp, Artificial Sequence
  Description of Artificial Sequence: Synthetic oligonucleotide
  Target: APOC3; (+) strand; PAM type: NRG; PAM sequence: TGG
aagacacacagcatgttggc

SEQ ID NO: 9470 - DNA, 20 bp, Artificial Sequence
  Description of Artificial Sequence: Synthetic oligonucleotide
  Target: APOC3; (+) strand; PAM type: NRG; PAM sequence: TGG
acacagcatgttggctggac

SEQ ID NO: 9471 - DNA, 20 bp, Artificial Sequence
  Description of Artificial Sequence: Synthetic oligonucleotide
  Target: APOC3; (+) strand; PAM type: NRG; PAM sequence: CGG
agcatgttggctggactgga

SEQ ID NO: 9472 - DNA, 20 bp, Artificial Sequence
  Description of Artificial Sequence: Synthetic oligonucleotide
  Target: APOC3; (+) strand; PAM type: NRG; PAM sequence: GAG
catgttggctggactggacg

SEQ ID NO: 9473 - DNA, 20 bp, Artificial Sequence
  Description of Artificial Sequence: Synthetic oligonucleotide
  Target: APOC3; (+) strand; PAM type: NRG; PAM sequence: CAG
tggctggactggacggagat

SEQ ID NO: 9474 - DNA, 20 bp, Artificial Sequence
  Description of Artificial Sequence: Synthetic oligonucleotide
  Target: APOC3; (+) strand; PAM type: NRG; PAM sequence: CAG
ggactggacggagatcagtc

SEQ ID NO: 9475 - DNA, 20 bp, Artificial Sequence
  Description of Artificial Sequence: Synthetic oligonucleotide
  Target: APOC3; (+) strand; PAM type: NRG; PAM sequence: CAG
acggagatcagtccagaccg

SEQ ID NO: 9476 - DNA, 20 bp, Artificial Sequence
  Description of Artificial Sequence: Synthetic oligonucleotide
  Target: APOC3; (+) strand; PAM type: NRG; PAM sequence: AGG
cggagatcagtccagaccgc

SEQ ID NO: 9477 - DNA, 20 bp, Artificial Sequence
  Description of Artificial Sequence: Synthetic oligonucleotide
  Target: APOC3; (+) strand; PAM type: NRG; PAM sequence: CAG
accgcaggtgccttgatgtt

SEQ ID NO: 9478 - DNA, 20 bp, Artificial Sequence
  Description of Artificial Sequence: Synthetic oligonucleotide
  Target: APOC3; (+) strand; PAM type: NRG; PAM sequence: TGG
aggtgccttgatgttcagtc

SEQ ID NO: 9479 - DNA, 20 bp, Artificial Sequence
  Description of Artificial Sequence: Synthetic oligonucleotide
  Target: APOC3; (+) strand; PAM type: NRG; PAM sequence: TGG
tgccttgatgttcagtctgg

SEQ ID NO: 9480 - DNA, 20 bp, Artificial Sequence
  Description of Artificial Sequence: Synthetic oligonucleotide
  Target: APOC3; (+) strand; PAM type: NRG; PAM sequence: GGG
gccttgatgttcagtctggt

SEQ ID NO: 9481 - DNA, 20 bp, Artificial Sequence
  Description of Artificial Sequence: Synthetic oligonucleotide
  Target: APOC3; (+) strand; PAM type: NRG; PAM sequence: TGG
ccatcccacccacctccctt

SEQ ID NO: 9482 - DNA, 20 bp, Artificial Sequence
  Description of Artificial Sequence: Synthetic oligonucleotide
  Target: APOC3; (+) strand; PAM type: NRG; PAM sequence: GGG
catcccacccacctcccttt

SEQ ID NO: 9483 - DNA, 20 bp, Artificial Sequence
  Description of Artificial Sequence: Synthetic oligonucleotide
  Target: APOC3; (+) strand; PAM type: NRG; PAM sequence: CAG
ctcgatccctcgcccctcac

SEQ ID NO: 9484 - DNA, 20 bp, Artificial Sequence
  Description of Artificial Sequence: Synthetic oligonucleotide
  Target: APOC3; (+) strand; PAM type: NRG; PAM sequence: GAG
ccctcaccagtcccccttct

SEQ ID NO: 9485 - DNA, 20 bp, Artificial Sequence
  Description of Artificial Sequence: Synthetic oligonucleotide
  Target: APOC3; (+) strand; PAM type: NRG; PAM sequence: GAG
ctcaccagtcccccttctga

SEQ ID NO: 9486 - DNA, 20 bp, Artificial Sequence
  Description of Artificial Sequence: Synthetic oligonucleotide
  Target: APOC3; (+) strand; PAM type: NRG; PAM sequence: TAG
ccccttctgagagcccgtat

SEQ ID NO: 9487 - DNA, 20 bp, Artificial Sequence
  Description of Artificial Sequence: Synthetic oligonucleotide
  Target: APOC3; (+) strand; PAM type: NRG; PAM sequence: CAG
cttctgagagcccgtattag

SEQ ID NO: 9488 - DNA, 20 bp, Artificial Sequence
  Description of Artificial Sequence: Synthetic oligonucleotide
  Target: APOC3; (+) strand; PAM type: NRG; PAM sequence: AGG
ttctgagagcccgtattagc

SEQ ID NO: 9489 - DNA, 20 bp, Artificial Sequence
  Description of Artificial Sequence: Synthetic oligonucleotide
  Target: APOC3; (+) strand; PAM type: NRG; PAM sequence: GGG
tctgagagcccgtattagca

SEQ ID NO: 9490 - DNA, 20 bp, Artificial Sequence
  Description of Artificial Sequence: Synthetic oligonucleotide
  Target: APOC3; (+) strand; PAM type: NRG; PAM sequence: GAG
tgagagcccgtattagcagg

SEQ ID NO: 9491 - DNA, 20 bp, Artificial Sequence
  Description of Artificial Sequence: Synthetic oligonucleotide
  Target: APOC3; (+) strand; PAM type: NRG; PAM sequence: CGG
agcccgtattagcagggagc

SEQ ID NO: 9492 - DNA, 20 bp, Artificial Sequence
  Description of Artificial Sequence: Synthetic oligonucleotide
  Target: APOC3; (+) strand; PAM type: NRG; PAM sequence: TGG
gagccggcccctactccttc

SEQ ID NO: 9493 - DNA, 20 bp, Artificial Sequence
  Description of Artificial Sequence: Synthetic oligonucleotide
  Target: APOC3; (+) strand; PAM type: NRG; PAM sequence: CAG
ccggcccctactccttctgg

SEQ ID NO: 9494 - DNA, 20 bp, Artificial Sequence
  Description of Artificial Sequence: Synthetic oligonucleotide
  Target: APOC3; (+) strand; PAM type: NRG; PAM sequence: CAG
cctactccttctggcagacc

SEQ ID NO: 9495 - DNA, 20 bp, Artificial Sequence
  Description of Artificial Sequence: Synthetic oligonucleotide
  Target: APOC3; (+) strand; PAM type: NRG; PAM sequence: AAG
tccttctggcagacccagct

SEQ ID NO: 9496 - DNA, 20 bp, Artificial Sequence
  Description of Artificial Sequence: Synthetic oligonucleotide
  Target: APOC3; (+) strand; PAM type: NRG; PAM sequence: AGG
ccttctggcagacccagcta

SEQ ID NO: 9497 - DNA, 20 bp, Artificial Sequence
  Description of Artificial Sequence: Synthetic oligonucleotide
  Target: APOC3; (+) strand; PAM type: NRG; PAM sequence: TAG
acccagctaaggttctacct

SEQ ID NO: 9498 - DNA, 20 bp, Artificial Sequence
  Description of Artificial Sequence: Synthetic oligonucleotide
  Target: APOC3; (+) strand; PAM type: NRG; PAM sequence: AGG
cccagctaaggttctacctt

SEQ ID NO: 9499 - DNA, 20 bp, Artificial Sequence
  Description of Artificial Sequence: Synthetic oligonucleotide
  Target: APOC3; (+) strand; PAM type: NRG; PAM sequence: GGG
ccagctaaggttctacctta

SEQ ID NO: 9500 - DNA, 20 bp, Artificial Sequence
  Description of Artificial Sequence: Synthetic oligonucleotide
  Target: APOC3; (+) strand; PAM type: NRG; PAM sequence: GGG
cagctaaggttctaccttag

SEQ ID NO: 9501 - DNA, 20 bp, Artificial Sequence
  Description of Artificial Sequence: Synthetic oligonucleotide
  Target: APOC3; (+) strand; PAM type: NRG; PAM sequence: CAG
taggggccacgccacctccc

SEQ ID NO: 9502 - DNA, 20 bp, Artificial Sequence
  Description of Artificial Sequence: Synthetic oligonucleotide
  Target: APOC3; (+) strand; PAM type: NRG; PAM sequence: AGG
aggggccacgccacctcccc

SEQ ID NO: 9503 - DNA, 20 bp, Artificial Sequence
  Description of Artificial Sequence: Synthetic oligonucleotide
  Target: APOC3; (+) strand; PAM type: NRG; PAM sequence: GGG
ggggccacgccacctcccca

SEQ ID NO: 9504 - DNA, 20 bp, Artificial Sequence
  Description of Artificial Sequence: Synthetic oligonucleotide
  Target: APOC3; (+) strand; PAM type: NRG; PAM sequence: GAG
ggccacgccacctccccagg

SEQ ID NO: 9505 - DNA, 20 bp, Artificial Sequence
  Description of Artificial Sequence: Synthetic oligonucleotide
  Target: APOC3; (+) strand; PAM type: NRG; PAM sequence: AGG
gccacgccacctccccaggg

SEQ ID NO: 9506 - DNA, 20 bp, Artificial Sequence
  Description of Artificial Sequence: Synthetic oligonucleotide
  Target: APOC3; (+) strand; PAM type: NRG; PAM sequence: GGG
ccacgccacctccccaggga

SEQ ID NO: 9507 - DNA, 20 bp, Artificial Sequence
  Description of Artificial Sequence: Synthetic oligonucleotide
  Target: APOC3; (+) strand; PAM type: NRG; PAM sequence: GGG
cacgccacctccccagggag

SEQ ID NO: 9508 - DNA, 20 bp, Artificial Sequence
  Description of Artificial Sequence: Synthetic oligonucleotide
  Target: APOC3; (+) strand; PAM type: NRG; PAM sequence: CAG
cacctccccagggaggggtc

SEQ ID NO: 9509 - DNA, 20 bp, Artificial Sequence
  Description of Artificial Sequence: Synthetic oligonucleotide
  Target: APOC3; (+) strand; PAM type: NRG; PAM sequence: GAG
cctccccagggaggggtcca

SEQ ID NO: 9510 - DNA, 20 bp, Artificial Sequence
  Description of Artificial Sequence: Synthetic oligonucleotide
  Target: APOC3; (+) strand; PAM type: NRG; PAM sequence: AGG
ctccccagggaggggtccag

SEQ ID NO: 9511 - DNA, 20 bp, Artificial Sequence
  Description of Artificial Sequence: Synthetic oligonucleotide
  Target: APOC3; (+) strand; PAM type: NRG; PAM sequence: TGG
cagggaggggtccagaggca

SEQ ID NO: 9512 - DNA, 20 bp, Artificial Sequence
  Description of Artificial Sequence: Synthetic oligonucleotide
  Target: APOC3; (+) strand; PAM type: NRG; PAM sequence: GGG
agggaggggtccagaggcat

SEQ ID NO: 9513 - DNA, 20 bp, Artificial Sequence
  Description of Artificial Sequence: Synthetic oligonucleotide
  Target: APOC3; (+) strand; PAM type: NRG; PAM sequence: GGG
gggaggggtccagaggcatg

SEQ ID NO: 9514 - DNA, 20 bp, Artificial Sequence
  Description of Artificial Sequence: Synthetic oligonucleotide
  Target: APOC3; (+) strand; PAM type: NRG; PAM sequence: TGG
ggtccagaggcatggggacc

SEQ ID NO: 9515 - DNA, 20 bp, Artificial Sequence
  Description of Artificial Sequence: Synthetic oligonucleotide
  Target: APOC3; (+) strand; PAM type: NRG; PAM sequence: GGG
gtccagaggcatggggacct

SEQ ID NO: 9516 - DNA, 20 bp, Artificial Sequence
  Description of Artificial Sequence: Synthetic oligonucleotide
  Target: APOC3; (+) strand; PAM type: NRG; PAM sequence: GGG
tccagaggcatggggacctg

SEQ ID NO: 9517 - DNA, 20 bp, Artificial Sequence
  Description of Artificial Sequence: Synthetic oligonucleotide
  Target: APOC3; (+) strand; PAM type: NRG; PAM sequence: CAG
gggacctggggtgcccctca

SEQ ID NO: 9518 - DNA, 20 bp, Artificial Sequence
  Description of Artificial Sequence: Synthetic oligonucleotide
  Target: APOC3; (+) strand; PAM type: NRG; PAM sequence: AGG
ggacctggggtgcccctcac

SEQ ID NO: 9519 - DNA, 20 bp, Artificial Sequence
  Description of Artificial Sequence: Synthetic oligonucleotide
  Target: APOC3; (+) strand; PAM type: NRG; PAM sequence: CAG
cctcacaggacacttccttg

SEQ ID NO: 9520 - DNA, 20 bp, Artificial Sequence
  Description of Artificial Sequence: Synthetic oligonucleotide
  Target: APOC3; (+) strand; PAM type: NRG; PAM sequence: AGG
ctcacaggacacttccttgc

SEQ ID NO: 9521 - DNA, 20 bp, Artificial Sequence
  Description of Artificial Sequence: Synthetic oligonucleotide
  Target: APOC3; (+) strand; PAM type: NRG; PAM sequence: CAG
aggacacttccttgcaggaa

SEQ ID NO: 9522 - DNA, 20 bp, Artificial Sequence
  Description of Artificial Sequence: Synthetic oligonucleotide
  Target: APOC3; (+) strand; PAM type: NRG; PAM sequence: GAG
gacacttccttgcaggaaca

SEQ ID NO: 9523 - DNA, 20 bp, Artificial Sequence
  Description of Artificial Sequence: Synthetic oligonucleotide
  Target: APOC3; (+) strand; PAM type: NRG; PAM sequence: AGG
acacttccttgcaggaacag

SEQ ID NO: 9524 - DNA, 20 bp, Artificial Sequence
  Description of Artificial Sequence: Synthetic oligonucleotide
  Target: APOC3; (+) strand; PAM type: NRG; PAM sequence: CAG
gcaggaacagaggtgccatg

SEQ ID NO: 9525 - DNA, 20 bp, Artificial Sequence
  Description of Artificial Sequence: Synthetic oligonucleotide
  Target: APOC3; (+) strand; PAM type: NRG; PAM sequence: CGG
acagaggtgccatgcagccc

SEQ ID NO: 9526 - DNA, 20 bp, Artificial Sequence
  Description of Artificial Sequence: Synthetic oligonucleotide
  Target: APOC3; (+) strand; PAM type: NRG; PAM sequence: GGG
cagaggtgccatgcagcccc

SEQ ID NO: 9527 - DNA, 20 bp, Artificial Sequence
  Description of Artificial Sequence: Synthetic oligonucleotide
  Target: APOC3; (+) strand; PAM type: NRG; PAM sequence: TGG
actccttgttgttgccctcc

SEQ ID NO: 9528 - DNA, 20 bp, Artificial Sequence
  Description of Artificial Sequence: Synthetic oligonucleotide
  Target: APOC3; (+) strand; PAM type: NRG; PAM sequence: TGG
tgttgccctcctggcgctcc

SEQ ID NO: 9529 - DNA, 20 bp, Artificial Sequence
  Description of Artificial Sequence: Synthetic oligonucleotide
  Target: APOC3; (+) strand; PAM type: NRG; PAM sequence: AAG
cgctcctggcctctgcccgt

SEQ ID NO: 9530 - DNA, 20 bp, Artificial Sequence
  Description of Artificial Sequence: Synthetic oligonucleotide
  Target: APOC3; (+) strand; PAM type: NRG; PAM sequence: TGG
ggcctctgcccgtaagcact

SEQ ID NO: 9531 - DNA, 20 bp, Artificial Sequence
  Description of Artificial Sequence: Synthetic oligonucleotide
  Target: APOC3; (+) strand; PAM type: NRG; PAM sequence: TGG
ctctgcccgtaagcacttgg

SEQ ID NO: 9532 - DNA, 20 bp, Artificial Sequence
  Description of Artificial Sequence: Synthetic oligonucleotide
  Target: APOC3; (+) strand; PAM type: NRG; PAM sequence: GGG
tctgcccgtaagcacttggt

SEQ ID NO: 9533 - DNA, 20 bp, Artificial Sequence
  Description of Artificial Sequence: Synthetic oligonucleotide
  Target: APOC3; (+) strand; PAM type: NRG; PAM sequence: TGG
ccgtaagcacttggtgggac

SEQ ID NO: 9534 - DNA, 20 bp, Artificial Sequence
  Description of Artificial Sequence: Synthetic oligonucleotide
  Target: APOC3; (+) strand; PAM type: NRG; PAM sequence: GGG
cgtaagcacttggtgggact

SEQ ID NO: 9535 - DNA, 20 bp, Artificial Sequence
  Description of Artificial Sequence: Synthetic oligonucleotide
  Target: APOC3; (+) strand; PAM type: NRG; PAM sequence: TGG
agcacttggtgggactgggc

SEQ ID NO: 9536 - DNA, 20 bp, Artificial Sequence
  Description of Artificial Sequence: Synthetic oligonucleotide
  Target: APOC3; (+) strand; PAM type: NRG; PAM sequence: GGG
gcacttggtgggactgggct

SEQ ID NO: 9537 - DNA, 20 bp, Artificial Sequence
  Description of Artificial Sequence: Synthetic oligonucleotide
  Target: APOC3; (+) strand; PAM type: NRG; PAM sequence: GGG
cacttggtgggactgggctg

SEQ ID NO: 9538 - DNA, 20 bp, Artificial Sequence
  Description of Artificial Sequence: Synthetic oligonucleotide
  Target: APOC3; (+) strand; PAM type: NRG; PAM sequence: GGG
acttggtgggactgggctgg

SEQ ID NO: 9539 - DNA, 20 bp, Artificial Sequence
  Description of Artificial Sequence: Synthetic oligonucleotide
  Target: APOC3; (+) strand; PAM type: NRG; PAM sequence: CAG
tggtgggactgggctggggg

SEQ ID NO: 9540 - DNA, 20 bp, Artificial Sequence
  Description of Artificial Sequence: Synthetic oligonucleotide
  Target: APOC3; (+) strand; PAM type: NRG; PAM sequence: AGG
ggtgggactgggctgggggc

SEQ ID NO: 9541 - DNA, 20 bp, Artificial Sequence
  Description of Artificial Sequence: Synthetic oligonucleotide
  Target: APOC3; (+) strand; PAM type: NRG; PAM sequence: GGG
gtgggactgggctgggggca

SEQ ID NO: 9542 - DNA, 20 bp, Artificial Sequence
  Description of Artificial Sequence: Synthetic oligonucleotide
  Target: APOC3; (+) strand; PAM type: NRG; PAM sequence: TGG
ggactgggctgggggcaggg

SEQ ID NO: 9543 - DNA, 20 bp, Artificial Sequence
  Description of Artificial Sequence: Synthetic oligonucleotide
  Target: APOC3; (+) strand; PAM type: NRG; PAM sequence: GAG
actgggctgggggcagggtg

SEQ ID NO: 9544 - DNA, 20 bp, Artificial Sequence
  Description of Artificial Sequence: Synthetic oligonucleotide
  Target: APOC3; (+) strand; PAM type: NRG; PAM sequence: AGG
ctgggctgggggcagggtgg

SEQ ID NO: 9545 - DNA, 20 bp, Artificial Sequence
  Description of Artificial Sequence: Synthetic oligonucleotide
  Target: APOC3; (+) strand; PAM type: NRG; PAM sequence: TGG
ggggcagggtggaggcaact

SEQ ID NO: 9546 - DNA, 20 bp, Artificial Sequence
  Description of Artificial Sequence: Synthetic oligonucleotide
  Target: APOC3; (+) strand; PAM type: NRG; PAM sequence: GGG
gggcagggtggaggcaactt

SEQ ID NO: 9547 - DNA, 20 bp, Artificial Sequence
  Description of Artificial Sequence: Synthetic oligonucleotide
  Target: APOC3; (+) strand; PAM type: NRG; PAM sequence: GGG
ggcagggtggaggcaacttg

SEQ ID NO: 9548 - DNA, 20 bp, Artificial Sequence
  Description of Artificial Sequence: Synthetic oligonucleotide
  Target: APOC3; (+) strand; PAM type: NRG; PAM sequence: CAG
tggaggcaacttggggatcc

SEQ ID NO: 9549 - DNA, 20 bp, Artificial Sequence
  Description of Artificial Sequence: Synthetic oligonucleotide
  Target: APOC3; (+) strand; PAM type: NRG; PAM sequence: TGG
cttggggatcccagtcccaa

SEQ ID NO: 9550 - DNA, 20 bp, Artificial Sequence
  Description of Artificial Sequence: Synthetic oligonucleotide
  Target: APOC3; (+) strand; PAM type: NRG; PAM sequence: GGG
ttggggatcccagtcccaat

SEQ ID NO: 9551 - DNA, 20 bp, Artificial Sequence
  Description of Artificial Sequence: Synthetic oligonucleotide
  Target: APOC3; (+) strand; PAM type: NRG; PAM sequence: TGG
gggatcccagtcccaatggg

SEQ ID NO: 9552 - DNA, 20 bp, Artificial Sequence
  Description of Artificial Sequence: Synthetic oligonucleotide
  Target: APOC3; (+) strand; PAM type: NRG; PAM sequence: AAG
cccagtcccaatgggtggtc

SEQ ID NO: 9553 - DNA, 20 bp, Artificial Sequence
  Description of Artificial Sequence: Synthetic oligonucleotide
  Target: APOC3; (+) strand; PAM type: NRG; PAM sequence: CAG
agtcccaatgggtggtcaag

SEQ ID NO: 9554 - DNA, 20 bp, Artificial Sequence
  Description of Artificial Sequence: Synthetic oligonucleotide
  Target: APOC3; (+) strand; PAM type: NRG; PAM sequence: AGG
gtcccaatgggtggtcaagc

SEQ ID NO: 9555 - DNA, 20 bp, Artificial Sequence
  Description of Artificial Sequence: Synthetic oligonucleotide
  Target: APOC3; (+) strand; PAM type: NRG; PAM sequence: GAG
cccaatgggtggtcaagcag

SEQ ID NO: 9556 - DNA, 20 bp, Artificial Sequence
  Description of Artificial Sequence: Synthetic oligonucleotide
  Target: APOC3; (+) strand; PAM type: NRG; PAM sequence: CAG
tgggtggtcaagcaggagcc

SEQ ID NO: 9557 - DNA, 20 bp, Artificial Sequence
  Description of Artificial Sequence: Synthetic oligonucleotide
  Target: APOC3; (+) strand; PAM type: NRG; PAM sequence: AGG
gggtggtcaagcaggagccc

SEQ ID NO: 9558 - DNA, 20 bp, Artificial Sequence
  Description of Artificial Sequence: Synthetic oligonucleotide
  Target: APOC3; (+) strand; PAM type: NRG; PAM sequence: GGG
ggtggtcaagcaggagccca

SEQ ID NO: 9559 - DNA, 20 bp, Artificial Sequence
  Description of Artificial Sequence: Synthetic oligonucleotide
  Target: APOC3; (+) strand; PAM type: NRG; PAM sequence: CAG
gcaggagcccagggctcgtc

SEQ ID NO: 9560 - DNA, 20 bp, Artificial Sequence
  Description of Artificial Sequence: Synthetic oligonucleotide
  Target: APOC3; (+) strand; PAM type: NRG; PAM sequence: GAG
aggagcccagggctcgtcca

SEQ ID NO: 9561 - DNA, 20 bp, Artificial Sequence
  Description of Artificial Sequence: Synthetic oligonucleotide
  Target: APOC3; (+) strand; PAM type: NRG; PAM sequence: AGG
ggagcccagggctcgtccag

SEQ ID NO: 9562 - DNA, 20 bp, Artificial Sequence
  Description of Artificial Sequence: Synthetic oligonucleotide
  Target: APOC3; (+) strand; PAM type: NRG; PAM sequence: CAG
agaggccgatccaccccact

SEQ ID NO: 9563 - DNA, 20 bp, Artificial Sequence
  Description of Artificial Sequence: Synthetic oligonucleotide
  Target: APOC3; (+) strand; PAM type: NRG; PAM sequence: CAG
actcagccctgctctttcct

SEQ ID NO: 9564 - DNA, 20 bp, Artificial Sequence
  Description of Artificial Sequence: Synthetic oligonucleotide
  Target: APOC3; (+) strand; PAM type: NRG; PAM sequence: AGG
ctcagccctgctctttcctc

SEQ ID NO: 9565 - DNA, 20 bp, Artificial Sequence
  Description of Artificial Sequence: Synthetic oligonucleotide
  Target: APOC3; (+) strand; PAM type: NRG; PAM sequence: GAG
cagccctgctctttcctcag

SEQ ID NO: 9566 - DNA, 20 bp, Artificial Sequence
  Description of Artificial Sequence: Synthetic oligonucleotide
  Target: APOC3; (+) strand; PAM type: NRG; PAM sequence: CAG
tgctctttcctcaggagctt

SEQ ID NO: 9567 - DNA, 20 bp, Artificial Sequence
  Description of Artificial Sequence: Synthetic oligonucleotide
  Target: APOC3; (+) strand; PAM type: NRG; PAM sequence: GAG
ctctttcctcaggagcttca

SEQ ID NO: 9568 - DNA, 20 bp, Artificial Sequence
  Description of Artificial Sequence: Synthetic oligonucleotide
  Target: APOC3; (+) strand; PAM type: NRG; PAM sequence: AGG
tctttcctcaggagcttcag

SEQ ID NO: 9569 - DNA, 20 bp, Artificial Sequence
  Description of Artificial Sequence: Synthetic oligonucleotide
  Target: APOC3; (+) strand; PAM type: NRG; PAM sequence: GAG
cctcaggagcttcagaggcc

SEQ ID NO: 9570 - DNA, 20 bp, Artificial Sequence
  Description of Artificial Sequence: Synthetic oligonucleotide
  Target: APOC3; (+) strand; PAM type: NRG; PAM sequence: AGG
ctcaggagcttcagaggccg

SEQ ID NO: 9571 - DNA, 20 bp, Artificial Sequence
  Description of Artificial Sequence: Synthetic oligonucleotide
  Target: APOC3; (+) strand; PAM type: NRG; PAM sequence: CAG
gccgaggatgcctcccttct

SEQ ID NO: 9572 - DNA, 20 bp, Artificial Sequence
  Description of Artificial Sequence: Synthetic oligonucleotide
  Target: APOC3; (+) strand; PAM type: NRG; PAM sequence: CAG
cctcccttctcagcttcatg

SEQ ID NO: 9573 - DNA, 20 bp, Artificial Sequence
  Description of Artificial Sequence: Synthetic oligonucleotide
  Target: APOC3; (+) strand; PAM type: NRG; PAM sequence: AGG
ctcccttctcagcttcatgc

SEQ ID NO: 9574 - DNA, 20 bp, Artificial Sequence
  Description of Artificial Sequence: Synthetic oligonucleotide
  Target: APOC3; (+) strand; PAM type: NRG; PAM sequence: GGG
tcccttctcagcttcatgca

SEQ ID NO: 9575 - DNA, 20 bp, Artificial Sequence
  Description of Artificial Sequence: Synthetic oligonucleotide
  Target: APOC3; (+) strand; PAM type: NRG; PAM sequence: AAG
gcttcatgcagggttacatg

SEQ ID NO: 9576 - DNA, 20 bp, Artificial Sequence
  Description of Artificial Sequence: Synthetic oligonucleotide
  Target: APOC3; (+) strand; PAM type: NRG; PAM sequence: AAG
gttacatgaagcacgccacc

SEQ ID NO: 9577 - DNA, 20 bp, Artificial Sequence
  Description of Artificial Sequence: Synthetic oligonucleotide
  Target: APOC3; (+) strand; PAM type: NRG; PAM sequence: AAG
agcacgccaccaagaccgcc

SEQ ID NO: 9578 - DNA, 20 bp, Artificial Sequence
  Description of Artificial Sequence: Synthetic oligonucleotide
  Target: APOC3; (+) strand; PAM type: NRG; PAM sequence: AGG
gcacgccaccaagaccgcca

SEQ ID NO: 9579 - DNA, 20 bp, Artificial Sequence
  Description of Artificial Sequence: Synthetic oligonucleotide
  Target: APOC3; (+) strand; PAM type: NRG; PAM sequence: GAG
aagaccgccaaggatgcact

SEQ ID NO: 9580 - DNA, 20 bp, Artificial Sequence
  Description of Artificial Sequence: Synthetic oligonucleotide
  Target: APOC3; (+) strand; PAM type: NRG; PAM sequence: CAG
accgccaaggatgcactgag

SEQ ID NO: 9581 - DNA, 20 bp, Artificial Sequence
  Description of Artificial Sequence: Synthetic oligonucleotide
  Target: APOC3; (+) strand; PAM type: NRG; PAM sequence: CAG
aggatgcactgagcagcgtg

SEQ ID NO: 9582 - DNA, 20 bp, Artificial Sequence
  Description of Artificial Sequence: Synthetic oligonucleotide
  Target: APOC3; (+) strand; PAM type: NRG; PAM sequence: AGG
ggatgcactgagcagcgtgc

SEQ ID NO: 9583 - DNA, 20 bp, Artificial Sequence
  Description of Artificial Sequence: Synthetic oligonucleotide
  Target: APOC3; (+) strand; PAM type: NRG; PAM sequence: GAG
atgcactgagcagcgtgcag

SEQ ID NO: 9584 - DNA, 20 bp, Artificial Sequence
  Description of Artificial Sequence: Synthetic oligonucleotide
  Target: APOC3; (+) strand; PAM type: NRG; PAM sequence: CAG
tgagcagcgtgcaggagtcc

SEQ ID NO: 9585 - DNA, 20 bp, Artificial Sequence
  Description of Artificial Sequence: Synthetic oligonucleotide
  Target: APOC3; (+) strand; PAM type: NRG; PAM sequence: AGG
gagcagcgtgcaggagtccc

SEQ ID NO: 9586 - DNA, 20 bp, Artificial Sequence
  Description of Artificial Sequence: Synthetic oligonucleotide
  Target: APOC3; (+) strand; PAM type: NRG; PAM sequence: TGG
cagcgtgcaggagtcccagg

SEQ ID NO: 9587 - DNA, 20 bp, Artificial Sequence
  Description of Artificial Sequence: Synthetic oligonucleotide
  Target: APOC3; (+) strand; PAM type: NRG; PAM sequence: CAG
tgcaggagtcccaggtggcc

SEQ ID NO: 9588 - DNA, 20 bp, Artificial Sequence
  Description of Artificial Sequence: Synthetic oligonucleotide
  Target: APOC3; (+) strand; PAM type: NRG; PAM sequence: CAG
aggagtcccaggtggcccag

SEQ ID NO: 9589 - DNA, 20 bp, Artificial Sequence
  Description of Artificial Sequence: Synthetic oligonucleotide
  Target: APOC3; (+) strand; PAM type: NRG; PAM sequence: AGG
ggagtcccaggtggcccagc

SEQ ID NO: 9590 - DNA, 20 bp, Artificial Sequence
  Description of Artificial Sequence: Synthetic oligonucleotide
  Target: APOC3; (+) strand; PAM type: NRG; PAM sequence: CAG
tcccaggtggcccagcaggc

SEQ ID NO: 9591 - DNA, 20 bp, Artificial Sequence
  Description of Artificial Sequence: Synthetic oligonucleotide
  Target: APOC3; (+) strand; PAM type: NRG; PAM sequence: AGG
cccaggtggcccagcaggcc

SEQ ID NO: 9592 - DNA, 20 bp, Artificial Sequence
  Description of Artificial Sequence: Synthetic oligonucleotide
  Target: APOC3; (+) strand; PAM type: NRG; PAM sequence: TGG
agcaggccaggtacacccgc

SEQ ID NO: 9593 - DNA, 20 bp, Artificial Sequence
  Description of Artificial Sequence: Synthetic oligonucleotide
  Target: APOC3; (+) strand; PAM type: NRG; PAM sequence: CAG
tccctccccatcccccctgc

SEQ ID NO: 9594 - DNA, 20 bp, Artificial Sequence
  Description of Artificial Sequence: Synthetic oligonucleotide
  Target: APOC3; (+) strand; PAM type: NRG; PAM sequence: TGG
attcccacccgcccctgccc

SEQ ID NO: 9595 - DNA, 20 bp, Artificial Sequence
  Description of Artificial Sequence: Synthetic oligonucleotide
  Target: APOC3; (+) strand; PAM type: NRG; PAM sequence: GAG
ccacccgcccctgccctggt

SEQ ID NO: 9596 - DNA, 20 bp, Artificial Sequence
  Description of Artificial Sequence: Synthetic oligonucleotide
  Target: APOC3; (+) strand; PAM type: NRG; PAM sequence: TGG
ccctggtgagatcccaacaa

SEQ ID NO: 9597 - DNA, 20 bp, Artificial Sequence
  Description of Artificial Sequence: Synthetic oligonucleotide
  Target: APOC3; (+) strand; PAM type: NRG; PAM sequence: TGG
gtgagatcccaacaatggaa

SEQ ID NO: 9598 - DNA, 20 bp, Artificial Sequence
  Description of Artificial Sequence: Synthetic oligonucleotide
  Target: APOC3; (+) strand; PAM type: NRG; PAM sequence: GAG
gagatcccaacaatggaatg

SEQ ID NO: 9599 - DNA, 20 bp, Artificial Sequence
  Description of Artificial Sequence: Synthetic oligonucleotide
  Target: APOC3; (+) strand; PAM type: NRG; PAM sequence: AGG
agatcccaacaatggaatgg

SEQ ID NO: 9600 - DNA, 20 bp, Artificial Sequence
  Description of Artificial Sequence: Synthetic oligonucleotide
  Target: APOC3; (+) strand; PAM type: NRG; PAM sequence: CAG
acaatggaatggaggtgctc

SEQ ID NO: 9601 - DNA, 20 bp, Artificial Sequence
  Description of Artificial Sequence: Synthetic oligonucleotide
  Target: APOC3; (+) strand; PAM type: NRG; PAM sequence: TGG
ggaggtgctccagcctcccc

SEQ ID NO: 9602 - DNA, 20 bp, Artificial Sequence
  Description of Artificial Sequence: Synthetic oligonucleotide
  Target: APOC3; (+) strand; PAM type: NRG; PAM sequence: GGG
gaggtgctccagcctcccct

SEQ ID NO: 9603 - DNA, 20 bp, Artificial Sequence
  Description of Artificial Sequence: Synthetic oligonucleotide
  Target: APOC3; (+) strand; PAM type: NRG; PAM sequence: CAG
cccctgggcctgtgcctctt

SEQ ID NO: 9604 - DNA, 20 bp, Artificial Sequence
  Description of Artificial Sequence: Synthetic oligonucleotide
  Target: APOC3; (+) strand; PAM type: NRG; PAM sequence: CAG
ttcagcctcctctttcctca

SEQ ID NO: 9605 - DNA, 20 bp, Artificial Sequence
  Description of Artificial Sequence: Synthetic oligonucleotide
  Target: APOC3; (+) strand; PAM type: NRG; PAM sequence: AGG
tcagcctcctctttcctcac

SEQ ID NO: 9606 - DNA, 20 bp, Artificial Sequence
  Description of Artificial Sequence: Synthetic oligonucleotide
  Target: APOC3; (+) strand; PAM type: NRG; PAM sequence: GGG
cagcctcctctttcctcaca

SEQ ID NO: 9607 - DNA, 20 bp, Artificial Sequence
  Description of Artificial Sequence: Synthetic oligonucleotide
  Target: APOC3; (+) strand; PAM type: NRG; PAM sequence: CAG
tttcctcacagggcctttgt

SEQ ID NO: 9608 - DNA, 20 bp, Artificial Sequence
  Description of Artificial Sequence: Synthetic oligonucleotide
  Target: APOC3; (+) strand; PAM type: NRG; PAM sequence: AGG
ttcctcacagggcctttgtc

SEQ ID NO: 9609 - DNA, 20 bp, Artificial Sequence
  Description of Artificial Sequence: Synthetic oligonucleotide
  Target: APOC3; (+) strand; PAM type: NRG; PAM sequence: CGG
gggcctttgtcaggctgctg

SEQ ID NO: 9610 - DNA, 20 bp, Artificial Sequence
  Description of Artificial Sequence: Synthetic oligonucleotide
  Target: APOC3; (+) strand; PAM type: NRG; PAM sequence: GGG
ggcctttgtcaggctgctgc

SEQ ID NO: 9611 - DNA, 20 bp, Artificial Sequence
  Description of Artificial Sequence: Synthetic oligonucleotide
  Target: APOC3; (+) strand; PAM type: NRG; PAM sequence: GAG
cctttgtcaggctgctgcgg

SEQ ID NO: 9612 - DNA, 20 bp, Artificial Sequence
  Description of Artificial Sequence: Synthetic oligonucleotide
  Target: APOC3; (+) strand; PAM type: NRG; PAM sequence: GAG
tttgtcaggctgctgcggga

SEQ ID NO: 9613 - DNA, 20 bp, Artificial Sequence
  Description of Artificial Sequence: Synthetic oligonucleotide
  Target: APOC3; (+) strand; PAM type: NRG; PAM sequence: CAG
ggctgctgcgggagagatga

SEQ ID NO: 9614 - DNA, 20 bp, Artificial Sequence
  Description of Artificial Sequence: Synthetic oligonucleotide
  Target: APOC3; (+) strand; PAM type: NRG; PAM sequence: GAG
ctgctgcgggagagatgaca

SEQ ID NO: 9615 - DNA, 20 bp, Artificial Sequence
  Description of Artificial Sequence: Synthetic oligonucleotide
  Target: APOC3; (+) strand; PAM type: NRG; PAM sequence: GAG
gcgggagagatgacagagtt

SEQ ID NO: 9616 - DNA, 20 bp, Artificial Sequence
  Description of Artificial Sequence: Synthetic oligonucleotide
  Target: APOC3; (+) strand; PAM type: NRG; PAM sequence: CAG
agttgagactgcattcctcc

SEQ ID NO: 9617 - DNA, 20 bp, Artificial Sequence
  Description of Artificial Sequence: Synthetic oligonucleotide
  Target: APOC3; (+) strand; PAM type: NRG; PAM sequence: AGG
gttgagactgcattcctccc

SEQ ID NO: 9618 - DNA, 20 bp, Artificial Sequence
  Description of Artificial Sequence: Synthetic oligonucleotide
  Target: APOC3; (+) strand; PAM type: NRG; PAM sequence: CGG
ccaggtccctcctttctccc

SEQ ID NO: 9619 - DNA, 20 bp, Artificial Sequence
  Description of Artificial Sequence: Synthetic oligonucleotide
  Target: APOC3; (+) strand; PAM type: NRG; PAM sequence: GAG
aggtccctcctttctccccg

SEQ ID NO: 9620 - DNA, 20 bp, Artificial Sequence
  Description of Artificial Sequence: Synthetic oligonucleotide
  Target: APOC3; (+) strand; PAM type: NRG; PAM sequence: CAG
tccctcctttctccccggag

SEQ ID NO: 9621 - DNA, 20 bp, Artificial Sequence
  Description of Artificial Sequence: Synthetic oligonucleotide
  Target: APOC3; (+) strand; PAM type: NRG; PAM sequence: TAG
ctttctccccggagcagtcc

SEQ ID NO: 9622 - DNA, 20 bp, Artificial Sequence
  Description of Artificial Sequence: Synthetic oligonucleotide
  Target: APOC3; (+) strand; PAM type: NRG; PAM sequence: AGG
tttctccccggagcagtcct

SEQ ID NO: 9623 - DNA, 20 bp, Artificial Sequence
  Description of Artificial Sequence: Synthetic oligonucleotide
  Target: APOC3; (+) strand; PAM type: NRG; PAM sequence: GGG
ttctccccggagcagtccta

SEQ ID NO: 9624 - DNA, 20 bp, Artificial Sequence
  Description of Artificial Sequence: Synthetic oligonucleotide
  Target: APOC3; (+) strand; PAM type: NRG; PAM sequence: TAG
agtcctagggcgtgccgttt

SEQ ID NO: 9625 - DNA, 20 bp, Artificial Sequence
  Description of Artificial Sequence: Synthetic oligonucleotide
  Target: APOC3; (+) strand; PAM type: NRG; PAM sequence: TGG
tcttcttcttttttttttaa

SEQ ID NO: 9626 - DNA, 20 bp, Artificial Sequence
  Description of Artificial Sequence: Synthetic oligonucleotide
  Target: APOC3; (+) strand; PAM type: NRG; PAM sequence: GAG
ttcttcttttttttttaatg

SEQ ID NO: 9627 - DNA, 20 bp, Artificial Sequence
  Description of Artificial Sequence: Synthetic oligonucleotide
  Target: APOC3; (+) strand; PAM type: NRG; PAM sequence: TAG
tggagtctccctctgtcacc

SEQ ID NO: 9628 - DNA, 20 bp, Artificial Sequence
  Description of Artificial Sequence: Synthetic oligonucleotide
  Target: APOC3; (+) strand; PAM type: NRG; PAM sequence: AGG
ggagtctccctctgtcacct

SEQ ID NO: 9629 - DNA, 20 bp, Artificial Sequence
  Description of Artificial Sequence: Synthetic oligonucleotide
  Target: APOC3; (+) strand; PAM type: NRG; PAM sequence: TGG
tctccctctgtcacctaggc

SEQ ID NO: 9630 - DNA, 20 bp, Artificial Sequence
  Description of Artificial Sequence: Synthetic oligonucleotide
  Target: APOC3; (+) strand; PAM type: NRG; PAM sequence: GAG
tccctctgtcacctaggctg

SEQ ID NO: 9631 - DNA, 20 bp, Artificial Sequence
  Description of Artificial Sequence: Synthetic oligonucleotide
  Target: APOC3; (+) strand; PAM type: NRG; PAM sequence: CAG
ctgtcacctaggctggagtg

SEQ ID NO: 9632 - DNA, 20 bp, Artificial Sequence
  Description of Artificial Sequence: Synthetic oligonucleotide
  Target: APOC3; (+) strand; PAM type: NRG; PAM sequence: TGG
tcacctaggctggagtgcag

SEQ ID NO: 9633 - DNA, 20 bp, Artificial Sequence
  Description of Artificial Sequence: Synthetic oligonucleotide
  Target: APOC3; (+) strand; PAM type: NRG; PAM sequence: CGG
ggagtgcagtggtgccatct

SEQ ID NO: 9634 - DNA, 20 bp, Artificial Sequence
  Description of Artificial Sequence: Synthetic oligonucleotide
  Target: APOC3; (+) strand; PAM type: NRG; PAM sequence: CGG
tcactgcaacctccgtctcc

SEQ ID NO: 9635 - DNA, 20 bp, Artificial Sequence
  Description of Artificial Sequence: Synthetic oligonucleotide
  Target: APOC3; (+) strand; PAM type: NRG; PAM sequence: GGG
cactgcaacctccgtctccc

SEQ ID NO: 9636 - DNA, 20 bp, Artificial Sequence
  Description of Artificial Sequence: Synthetic oligonucleotide
  Target: APOC3; (+) strand; PAM type: NRG; PAM sequence: CAG
ttcaacccattctcctgcct

SEQ ID NO: 9637 - DNA, 20 bp, Artificial Sequence
  Description of Artificial Sequence: Synthetic oligonucleotide
  Target: APOC3; (+) strand; PAM type: NRG; PAM sequence: AAG
ttctcctgcctcagcctccc

SEQ ID NO: 9638 - DNA, 20 bp, Artificial Sequence
  Description of Artificial Sequence: Synthetic oligonucleotide
  Target: APOC3; (+) strand; PAM type: NRG; PAM sequence: TAG
tcctgcctcagcctcccaag

SEQ ID NO: 9639 - DNA, 20 bp, Artificial Sequence
  Description of Artificial Sequence: Synthetic oligonucleotide
  Target: APOC3; (+) strand; PAM type: NRG; PAM sequence: TGG
gcctcagcctcccaagtagc

SEQ ID NO: 9640 - DNA, 20 bp, Artificial Sequence
  Description of Artificial Sequence: Synthetic oligonucleotide
  Target: APOC3; (+) strand; PAM type: NRG; PAM sequence: GGG
cctcagcctcccaagtagct

SEQ ID NO: 9641 - DNA, 20 bp, Artificial Sequence
  Description of Artificial Sequence: Synthetic oligonucleotide
  Target: APOC3; (+) strand; PAM type: NRG; PAM sequence: CAG
ctcccaagtagctgggatta

SEQ ID NO: 9642 - DNA, 20 bp, Artificial Sequence
  Description of Artificial Sequence: Synthetic oligonucleotide
  Target: APOC3; (+) strand; PAM type: NRG; PAM sequence: AGG
tcccaagtagctgggattac

SEQ ID NO: 9643 - DNA, 20 bp, Artificial Sequence
  Description of Artificial Sequence: Synthetic oligonucleotide
  Target: APOC3; (+) strand; PAM type: NRG; PAM sequence: CAG
caggcacgcgccaccacacc

SEQ ID NO: 9644 - DNA, 20 bp, Artificial Sequence
  Description of Artificial Sequence: Synthetic oligonucleotide
  Target: APOC3; (+) strand; PAM type: NRG; PAM sequence: TAG
ccagctaatttttgtatttt

SEQ ID NO: 9645 - DNA, 20 bp, Artificial Sequence
  Description of Artificial Sequence: Synthetic oligonucleotide
  Target: APOC3; (+) strand; PAM type: NRG; PAM sequence: CAG
gctaatttttgtatttttag

SEQ ID NO: 9646 - DNA, 20 bp, Artificial Sequence
  Description of Artificial Sequence: Synthetic oligonucleotide
  Target: APOC3; (+) strand; PAM type: NRG; PAM sequence: GAG
taatttttgtatttttagca

SEQ ID NO: 9647 - DNA, 20 bp, Artificial Sequence
  Description of Artificial Sequence: Synthetic oligonucleotide
  Target: APOC3; (+) strand; PAM type: NRG; PAM sequence: TGG
ttttgtatttttagcagaga

SEQ ID NO: 9648 - DNA, 20 bp, Artificial Sequence
  Description of Artificial Sequence: Synthetic oligonucleotide
  Target: APOC3; (+) strand; PAM type: NRG; PAM sequence: GGG
tttgtatttttagcagagat

SEQ ID NO: 9649 - DNA, 20 bp, Artificial Sequence
  Description of Artificial Sequence: Synthetic oligonucleotide
  Target: APOC3; (+) strand; PAM type: NRG; PAM sequence: GGG
ttgtatttttagcagagatg

SEQ ID NO: 9650 - DNA, 20 bp, Artificial Sequence
  Description of Artificial Sequence: Synthetic oligonucleotide
  Target: APOC3; (+) strand; PAM type: NRG; PAM sequence: TGG
gagatggggtttcaccatgt

SEQ ID NO: 9651 - DNA, 20 bp, Artificial Sequence
  Description of Artificial Sequence: Synthetic oligonucleotide
  Target: APOC3; (+) strand; PAM type: NRG; PAM sequence: CAG
tggggtttcaccatgttggc

SEQ ID NO: 9652 - DNA, 20 bp, Artificial Sequence
  Description of Artificial Sequence: Synthetic oligonucleotide
  Target: APOC3; (+) strand; PAM type: NRG; PAM sequence: AGG
ggggtttcaccatgttggcc

SEQ ID NO: 9653 - DNA, 20 bp, Artificial Sequence
  Description of Artificial Sequence: Synthetic oligonucleotide
  Target: APOC3; (+) strand; PAM type: NRG; PAM sequence: TGG
tttcaccatgttggccaggt

SEQ ID NO: 9654 - DNA, 20 bp, Artificial Sequence
  Description of Artificial Sequence: Synthetic oligonucleotide
  Target: APOC3; (+) strand; PAM type: NRG; PAM sequence: CAG
tggtcttgaattcctgacct

SEQ ID NO: 9655 - DNA, 20 bp, Artificial Sequence
  Description of Artificial Sequence: Synthetic oligonucleotide
  Target: APOC3; (+) strand; PAM type: NRG; PAM sequence: AGG
ggtcttgaattcctgacctc

SEQ ID NO: 9656 - DNA, 20 bp, Artificial Sequence
  Description of Artificial Sequence: Synthetic oligonucleotide
  Target: APOC3; (+) strand; PAM type: NRG; PAM sequence: GGG
gtcttgaattcctgacctca

SEQ ID NO: 9657 - DNA, 20 bp, Artificial Sequence
  Description of Artificial Sequence: Synthetic oligonucleotide
  Target: APOC3; (+) strand; PAM type: NRG; PAM sequence: GGG
tcttgaattcctgacctcag

SEQ ID NO: 9658 - DNA, 20 bp, Artificial Sequence
  Description of Artificial Sequence: Synthetic oligonucleotide
  Target: APOC3; (+) strand; PAM type: NRG; PAM sequence: CGG
ctcaggggatcctcctgcct

SEQ ID NO: 9659 - DNA, 20 bp, Artificial Sequence
  Description of Artificial Sequence: Synthetic oligonucleotide
  Target: APOC3; (+) strand; PAM type: NRG; PAM sequence: AAG
cctcctgcctcggcctccca

SEQ ID NO: 9660 - DNA, 20 bp, Artificial Sequence
  Description of Artificial Sequence: Synthetic oligonucleotide
  Target: APOC3; (+) strand; PAM type: NRG; PAM sequence: TGG
gcctcggcctcccaaagtgc

SEQ ID NO: 9661 - DNA, 20 bp, Artificial Sequence
  Description of Artificial Sequence: Synthetic oligonucleotide
  Target: APOC3; (+) strand; PAM type: NRG; PAM sequence: GGG
cctcggcctcccaaagtgct

SEQ ID NO: 9662 - DNA, 20 bp, Artificial Sequence
  Description of Artificial Sequence: Synthetic oligonucleotide
  Target: APOC3; (+) strand; PAM type: NRG; PAM sequence: CAG
ctcccaaagtgctgggatta

SEQ ID NO: 9663 - DNA, 20 bp, Artificial Sequence
  Description of Artificial Sequence: Synthetic oligonucleotide
  Target: APOC3; (+) strand; PAM type: NRG; PAM sequence: AGG
tcccaaagtgctgggattac

SEQ ID NO: 9664 - DNA, 20 bp, Artificial Sequence
  Description of Artificial Sequence: Synthetic oligonucleotide
  Target: APOC3; (+) strand; PAM type: NRG; PAM sequence: GAG
agtgctgggattacaggcat

SEQ ID NO: 9665 - DNA, 20 bp, Artificial Sequence
  Description of Artificial Sequence: Synthetic oligonucleotide
  Target: APOC3; (+) strand; PAM type: NRG; PAM sequence: TGG
caggcatgagccactgcgcc

SEQ ID NO: 9666 - DNA, 20 bp, Artificial Sequence
  Description of Artificial Sequence: Synthetic oligonucleotide
  Target: APOC3; (+) strand; PAM type: NRG; PAM sequence: AAG
ggccccattttccttttctg

SEQ ID NO: 9667 - DNA, 20 bp, Artificial Sequence
  Description of Artificial Sequence: Synthetic oligonucleotide
  Target: APOC3; (+) strand; PAM type: NRG; PAM sequence: AGG
gccccattttccttttctga

SEQ ID NO: 9668 - DNA, 20 bp, Artificial Sequence
  Description of Artificial Sequence: Synthetic oligonucleotide
  Target: APOC3; (+) strand; PAM type: NRG; PAM sequence: TGG
attttccttttctgaaggtc

SEQ ID NO: 9669 - DNA, 20 bp, Artificial Sequence
  Description of Artificial Sequence: Synthetic oligonucleotide
  Target: APOC3; (+) strand; PAM type: NRG; PAM sequence: TAG
tccttttctgaaggtctggc

SEQ ID NO: 9670 - DNA, 20 bp, Artificial Sequence
  Description of Artificial Sequence: Synthetic oligonucleotide
  Target: APOC3; (+) strand; PAM type: NRG; PAM sequence: GAG
cttttctgaaggtctggcta

SEQ ID NO: 9671 - DNA, 20 bp, Artificial Sequence
  Description of Artificial Sequence: Synthetic oligonucleotide
  Target: APOC3; (+) strand; PAM type: NRG; PAM sequence: CAG
ttctgaaggtctggctagag

SEQ ID NO: 9672 - DNA, 20 bp, Artificial Sequence
  Description of Artificial Sequence: Synthetic oligonucleotide
  Target: APOC3; (+) strand; PAM type: NRG; PAM sequence: TGG
tgaaggtctggctagagcag

SEQ ID NO: 9673 - DNA, 20 bp, Artificial Sequence
  Description of Artificial Sequence: Synthetic oligonucleotide
  Target: APOC3; (+) strand; PAM type: NRG; PAM sequence: CAG
ctggctagagcagtggtcct

SEQ ID NO: 9674 - DNA, 20 bp, Artificial Sequence
  Description of Artificial Sequence: Synthetic oligonucleotide
  Target: APOC3; (+) strand; PAM type: NRG; PAM sequence: TGG
gcagtggtcctcagcctttt

SEQ ID NO: 9675 - DNA, 20 bp, Artificial Sequence
  Description of Artificial Sequence: Synthetic oligonucleotide
  Target: APOC3; (+) strand; PAM type: NRG; PAM sequence: CAG
gtcctcagcctttttggcac

SEQ ID NO: 9676 - DNA, 20 bp, Artificial Sequence
  Description of Artificial Sequence: Synthetic oligonucleotide
  Target: APOC3; (+) strand; PAM type: NRG; PAM sequence: AGG
tcctcagcctttttggcacc

SEQ ID NO: 9677 - DNA, 20 bp, Artificial Sequence
  Description of Artificial Sequence: Synthetic oligonucleotide
  Target: APOC3; (+) strand; PAM type: NRG; PAM sequence: GGG
cctcagcctttttggcacca

SEQ ID NO: 9678 - DNA, 20 bp, Artificial Sequence
  Description of Artificial Sequence: Synthetic oligonucleotide
  Target: APOC3; (+) strand; PAM type: NRG; PAM sequence: CAG
gcctttttggcaccagggac

SEQ ID NO: 9679 - DNA, 20 bp, Artificial Sequence
  Description of Artificial Sequence: Synthetic oligonucleotide
  Target: APOC3; (+) strand; PAM type: NRG; PAM sequence: TGG
ggcaccagggaccagttttg

SEQ ID NO: 9680 - DNA, 20 bp, Artificial Sequence
  Description of Artificial Sequence: Synthetic oligonucleotide
  Target: APOC3; (+) strand; PAM type: NRG; PAM sequence: TGG
accagggaccagttttgtgg

SEQ ID NO: 9681 - DNA, 20 bp, Artificial Sequence
  Description of Artificial Sequence: Synthetic oligonucleotide
  Target: APOC3; (+) strand; PAM type: NRG; PAM sequence: TGG
tgtggtggacaatttttcca

SEQ ID NO: 9682 - DNA, 20 bp, Artificial Sequence
  Description of Artificial Sequence: Synthetic oligonucleotide
  Target: APOC3; (+) strand; PAM type: NRG; PAM sequence: GGG
gtggtggacaatttttccat

SEQ ID NO: 9683 - DNA, 20 bp, Artificial Sequence
  Description of Artificial Sequence: Synthetic oligonucleotide
  Target: APOC3; (+) strand; PAM type: NRG; PAM sequence: CAG
tggacaatttttccatgggc

SEQ ID NO: 9684 - DNA, 20 bp, Artificial Sequence
  Description of Artificial Sequence: Synthetic oligonucleotide
  Target: APOC3; (+) strand; PAM type: NRG; PAM sequence: CGG
acaatttttccatgggccag

SEQ ID NO: 9685 - DNA, 20 bp, Artificial Sequence
  Description of Artificial Sequence: Synthetic oligonucleotide
  Target: APOC3; (+) strand; PAM type: NRG; PAM sequence: GGG
caatttttccatgggccagc

SEQ ID NO: 9686 - DNA, 20 bp, Artificial Sequence
  Description of Artificial Sequence: Synthetic oligonucleotide
  Target: APOC3; (+) strand; PAM type: NRG; PAM sequence: GGG
aatttttccatgggccagcg

SEQ ID NO: 9687 - DNA, 20 bp, Artificial Sequence
  Description of Artificial Sequence: Synthetic oligonucleotide
  Target: APOC3; (+) strand; PAM type: NRG; PAM sequence: TGG
tttccatgggccagcgggga

SEQ ID NO: 9688 - DNA, 20 bp, Artificial Sequence
  Description of Artificial Sequence: Synthetic oligonucleotide
  Target: APOC3; (+) strand; PAM type: NRG; PAM sequence: TGG
tgggccagcggggatggttt

SEQ ID NO: 9689 - DNA, 20 bp, Artificial Sequence
  Description of Artificial Sequence: Synthetic oligonucleotide
  Target: APOC3; (+) strand; PAM type: NRG; PAM sequence: GGG
gggccagcggggatggtttt

SEQ ID NO: 9690 - DNA, 20 bp, Artificial Sequence
  Description of Artificial Sequence: Synthetic oligonucleotide
  Target: APOC3; (+) strand; PAM type: NRG; PAM sequence: AAG
gcggggatggttttgggatg

SEQ ID NO: 9691 - DNA, 20 bp, Artificial Sequence
  Description of Artificial Sequence: Synthetic oligonucleotide
  Target: APOC3; (+) strand; PAM type: NRG; PAM sequence: CAG
gggatgaagctgttccacct

SEQ ID NO: 9692 - DNA, 20 bp, Artificial Sequence
  Description of Artificial Sequence: Synthetic oligonucleotide
  Target: APOC3; (+) strand; PAM type: NRG; PAM sequence: CAG
gctgttccacctcagatcat

SEQ ID NO: 9693 - DNA, 20 bp, Artificial Sequence
  Description of Artificial Sequence: Synthetic oligonucleotide
  Target: APOC3; (+) strand; PAM type: NRG; PAM sequence: AGG
ctgttccacctcagatcatc

SEQ ID NO: 9694 - DNA, 20 bp, Artificial Sequence
  Description of Artificial Sequence: Synthetic oligonucleotide
  Target: APOC3; (+) strand; PAM type: NRG; PAM sequence: TAG
cacctcagatcatcaggcat

SEQ ID NO: 9695 - DNA, 20 bp, Artificial Sequence
  Description of Artificial Sequence: Synthetic oligonucleotide
  Target: APOC3; (+) strand; PAM type: NRG; PAM sequence: AAG
atcaggcattagattctcat

SEQ ID NO: 9696 - DNA, 20 bp, Artificial Sequence
  Description of Artificial Sequence: Synthetic oligonucleotide
  Target: APOC3; (+) strand; PAM type: NRG; PAM sequence: AGG
tcaggcattagattctcata

SEQ ID NO: 9697 - DNA, 20 bp, Artificial Sequence
  Description of Artificial Sequence: Synthetic oligonucleotide
  Target: APOC3; (+) strand; PAM type: NRG; PAM sequence: GAG
aggcattagattctcataag

SEQ ID NO: 9698 - DNA, 20 bp, Artificial Sequence
  Description of Artificial Sequence: Synthetic oligonucleotide
  Target: APOC3; (+) strand; PAM type: NRG; PAM sequence: TAG
ctcataaggagccctccacc

SEQ ID NO: 9699 - DNA, 20 bp, Artificial Sequence
  Description of Artificial Sequence: Synthetic oligonucleotide
  Target: APOC3; (+) strand; PAM type: NRG; PAM sequence: TGG
gagccctccacctagatccc

SEQ ID NO: 9700 - DNA, 20 bp, Artificial Sequence
  Description of Artificial Sequence: Synthetic oligonucleotide
  Target: APOC3; (+) strand; PAM type: NRG; PAM sequence: CAG
acctagatccctggcatgtg

SEQ ID NO: 9701 - DNA, 20 bp, Artificial Sequence
  Description of Artificial Sequence: Synthetic oligonucleotide
  Target: APOC3; (+) strand; PAM type: NRG; PAM sequence: TAG
ctggcatgtgcagttcacaa

SEQ ID NO: 9702 - DNA, 20 bp, Artificial Sequence
  Description of Artificial Sequence: Synthetic oligonucleotide
  Target: APOC3; (+) strand; PAM type: NRG; PAM sequence: AGG
tggcatgtgcagttcacaat

SEQ ID NO: 9703 - DNA, 20 bp, Artificial Sequence
  Description of Artificial Sequence: Synthetic oligonucleotide
  Target: APOC3; (+) strand; PAM type: NRG; PAM sequence: GGG
ggcatgtgcagttcacaata

SEQ ID NO: 9704 - DNA, 20 bp, Artificial Sequence
  Description of Artificial Sequence: Synthetic oligonucleotide
  Target: APOC3; (+) strand; PAM type: NRG; PAM sequence: GAG
aatagggttcacactcctat

SEQ ID NO: 9705 - DNA, 20 bp, Artificial Sequence
  Description of Artificial Sequence: Synthetic oligonucleotide
  Target: APOC3; (+) strand; PAM type: NRG; PAM sequence: AAG
tcacactcctatgagaatgt

SEQ ID NO: 9706 - DNA, 20 bp, Artificial Sequence
  Description of Artificial Sequence: Synthetic oligonucleotide
  Target: APOC3; (+) strand; PAM type: NRG; PAM sequence: AGG
cacactcctatgagaatgta

SEQ ID NO: 9707 - DNA, 20 bp, Artificial Sequence
  Description of Artificial Sequence: Synthetic oligonucleotide
  Target: APOC3; (+) strand; PAM type: NRG; PAM sequence: CAG
tgtaaggccacttgatctga

SEQ ID NO: 9708 - DNA, 20 bp, Artificial Sequence
  Description of Artificial Sequence: Synthetic oligonucleotide
  Target: APOC3; (+) strand; PAM type: NRG; PAM sequence: AGG
gtaaggccacttgatctgac

SEQ ID NO: 9709 - DNA, 20 bp, Artificial Sequence
  Description of Artificial Sequence: Synthetic oligonucleotide
  Target: APOC3; (+) strand; PAM type: NRG; PAM sequence: GAG
aaggccacttgatctgacag

SEQ ID NO: 9710 - DNA, 20 bp, Artificial Sequence
  Description of Artificial Sequence: Synthetic oligonucleotide
  Target: APOC3; (+) strand; PAM type: NRG; PAM sequence: AGG
aggccacttgatctgacagg

SEQ ID NO: 9711 - DNA, 20 bp, Artificial Sequence
  Description of Artificial Sequence: Synthetic oligonucleotide
  Target: APOC3; (+) strand; PAM type: NRG; PAM sequence: CGG
ccacttgatctgacaggagg

SEQ ID NO: 9712 - DNA, 20 bp, Artificial Sequence
  Description of Artificial Sequence: Synthetic oligonucleotide
  Target: APOC3; (+) strand; PAM type: NRG; PAM sequence: GAG
acttgatctgacaggaggcg

SEQ ID NO: 9713 - DNA, 20 bp, Artificial Sequence
  Description of Artificial Sequence: Synthetic oligonucleotide
  Target: APOC3; (+) strand; PAM type: NRG; PAM sequence: CAG
atctgacaggaggcggagct

SEQ ID NO: 9714 - DNA, 20 bp, Artificial Sequence
  Description of Artificial Sequence: Synthetic oligonucleotide
  Target: APOC3; (+) strand; PAM type: NRG; PAM sequence: AGG
tctgacaggaggcggagctc

SEQ ID NO: 9715 - DNA, 20 bp, Artificial Sequence
  Description of Artificial Sequence: Synthetic oligonucleotide
  Target: APOC3; (+) strand; PAM type: NRG; PAM sequence: CGG
gacaggaggcggagctcagg

SEQ ID NO: 9716 - DNA, 20 bp, Artificial Sequence
  Description of Artificial Sequence: Synthetic oligonucleotide
  Target: APOC3; (+) strand; PAM type: NRG; PAM sequence: CAG
accactcacttcgtgctgtg

SEQ ID NO: 9717 - DNA, 20 bp, Artificial Sequence
  Description of Artificial Sequence: Synthetic oligonucleotide
  Target: APOC3; (+) strand; PAM type: NRG; PAM sequence: CGG
tcacttcgtgctgtgcagcc

SEQ ID NO: 9718 - DNA, 20 bp, Artificial Sequence
  Description of Artificial Sequence: Synthetic oligonucleotide
  Target: APOC3; (+) strand; PAM type: NRG; PAM sequence: CAG
ctgtgcagcccggctcctaa

SEQ ID NO: 9719 - DNA, 20 bp, Artificial Sequence
  Description of Artificial Sequence: Synthetic oligonucleotide
  Target: APOC3; (+) strand; PAM type: NRG; PAM sequence: TGG
gcccggctcctaacagtcca

SEQ ID NO: 9720 - DNA, 20 bp, Artificial Sequence
  Description of Artificial Sequence: Synthetic oligonucleotide
  Target: APOC3; (+) strand; PAM type: NRG; PAM sequence: CAG
gctcctaacagtccatggac

SEQ ID NO: 9721 - DNA, 20 bp, Artificial Sequence
  Description of Artificial Sequence: Synthetic oligonucleotide
  Target: APOC3; (+) strand; PAM type: NRG; PAM sequence: TGG
accagtacctatctatgact

SEQ ID NO: 9722 - DNA, 20 bp, Artificial Sequence
  Description of Artificial Sequence: Synthetic oligonucleotide
  Target: APOC3; (+) strand; PAM type: NRG; PAM sequence: GGG
ccagtacctatctatgactt

SEQ ID NO: 9723 - DNA, 20 bp, Artificial Sequence
  Description of Artificial Sequence: Synthetic oligonucleotide
  Target: APOC3; (+) strand; PAM type: NRG; PAM sequence: GGG
cagtacctatctatgacttg

SEQ ID NO: 9724 - DNA, 20 bp, Artificial Sequence
  Description of Artificial Sequence: Synthetic oligonucleotide
  Target: APOC3; (+) strand; PAM type: NRG; PAM sequence: GGG
agtacctatctatgacttgg

SEQ ID NO: 9725 - DNA, 20 bp, Artificial Sequence
  Description of Artificial Sequence: Synthetic oligonucleotide
  Target: APOC3; (+) strand; PAM type: NRG; PAM sequence: TGG
cctatctatgacttgggggt

SEQ ID NO: 9726 - DNA, 20 bp, Artificial Sequence
  Description of Artificial Sequence: Synthetic oligonucleotide
  Target: APOC3; (+) strand; PAM type: NRG; PAM sequence: GGG
ctatctatgacttgggggtt

SEQ ID NO: 9727 - DNA, 20 bp, Artificial Sequence
  Description of Artificial Sequence: Synthetic oligonucleotide
  Target: APOC3; (+) strand; PAM type: NRG; PAM sequence: GGG
tatctatgacttgggggttg

SEQ ID NO: 9728 - DNA, 20 bp, Artificial Sequence
  Description of Artificial Sequence: Synthetic oligonucleotide
  Target: APOC3; (+) strand; PAM type: NRG; PAM sequence: TGG
acttgggggttggggacccc

SEQ ID NO: 9729 - DNA, 20 bp, Artificial Sequence
  Description of Artificial Sequence: Synthetic oligonucleotide
  Target: APOC3; (+) strand; PAM type: NRG; PAM sequence: GGG
cttgggggttggggacccct

SEQ ID NO: 9730 - DNA, 20 bp, Artificial Sequence
  Description of Artificial Sequence: Synthetic oligonucleotide
  Target: APOC3; (+) strand; PAM type: NRG; PAM sequence: TAG
ggggttggggacccctgggc

SEQ ID NO: 9731 - DNA, 20 bp, Artificial Sequence
  Description of Artificial Sequence: Synthetic oligonucleotide
  Target: APOC3; (+) strand; PAM type: NRG; PAM sequence: AGG
gggttggggacccctgggct

SEQ ID NO: 9732 - DNA, 20 bp, Artificial Sequence
  Description of Artificial Sequence: Synthetic oligonucleotide
  Target: APOC3; (+) strand; PAM type: NRG; PAM sequence: GGG
ggttggggacccctgggcta

SEQ ID NO: 9733 - DNA, 20 bp, Artificial Sequence
  Description of Artificial Sequence: Synthetic oligonucleotide
  Target: APOC3; (+) strand; PAM type: NRG; PAM sequence: GGG
gttggggacccctgggctag

SEQ ID NO: 9734 - DNA, 20 bp, Artificial Sequence
  Description of Artificial Sequence: Synthetic oligonucleotide
  Target: APOC3; (+) strand; PAM type: NRG; PAM sequence: TGG
cctgggctaggggtttgcct

SEQ ID NO: 9735 - DNA, 20 bp, Artificial Sequence
  Description of Artificial Sequence: Synthetic oligonucleotide
  Target: APOC3; (+) strand; PAM type: NRG; PAM sequence: GGG
ctgggctaggggtttgcctt

SEQ ID NO: 9736 - DNA, 20 bp, Artificial Sequence
  Description of Artificial Sequence: Synthetic oligonucleotide
  Target: APOC3; (+) strand; PAM type: NRG; PAM sequence: GAG
gggctaggggtttgccttgg

SEQ ID NO: 9737 - DNA, 20 bp, Artificial Sequence
  Description of Artificial Sequence: Synthetic oligonucleotide
  Target: APOC3; (+) strand; PAM type: NRG; PAM sequence: AGG
ggctaggggtttgccttggg

SEQ ID NO: 9738 - DNA, 20 bp, Artificial Sequence
  Description of Artificial Sequence: Synthetic oligonucleotide
  Target: APOC3; (+) strand; PAM type: NRG; PAM sequence: AAG
ggccccacctgacccaattc

SEQ ID NO: 9739 - DNA, 20 bp, Artificial Sequence
  Description of Artificial Sequence: Synthetic oligonucleotide
  Target: APOC3; (+) strand; PAM type: NRG; PAM sequence: GAG
ctgacccaattcaagcccgt

SEQ ID NO: 9740 - DNA, 20 bp, Artificial Sequence
  Description of Artificial Sequence: Synthetic oligonucleotide
  Target: APOC3; (+) strand; PAM type: NRG; PAM sequence: AAG
gagtgcttctgctttgttct

SEQ ID NO: 9741 - DNA, 20 bp, Artificial Sequence
  Description of Artificial Sequence: Synthetic oligonucleotide
  Target: APOC3; (+) strand; PAM type: NRG; PAM sequence: TGG
ttctgctttgttctaagacc

SEQ ID NO: 9742 - DNA, 20 bp, Artificial Sequence
  Description of Artificial Sequence: Synthetic oligonucleotide
  Target: APOC3; (+) strand; PAM type: NRG; PAM sequence: GGG
tctgctttgttctaagacct

SEQ ID NO: 9743 - DNA, 20 bp, Artificial Sequence
  Description of Artificial Sequence: Synthetic oligonucleotide
  Target: APOC3; (+) strand; PAM type: NRG; PAM sequence: GGG
ctgctttgttctaagacctg

SEQ ID NO: 9744 - DNA, 20 bp, Artificial Sequence
  Description of Artificial Sequence: Synthetic oligonucleotide
  Target: APOC3; (+) strand; PAM type: NRG; PAM sequence: CAG
tttgttctaagacctggggc

SEQ ID NO: 9745 - DNA, 20 bp, Artificial Sequence
  Description of Artificial Sequence: Synthetic oligonucleotide
  Target: APOC3; (+) strand; PAM type: NRG; PAM sequence: GAG
ctaagacctggggccagtgt

SEQ ID NO: 9746 - DNA, 20 bp, Artificial Sequence
  Description of Artificial Sequence: Synthetic oligonucleotide
  Target: APOC3; (+) strand; PAM type: NRG; PAM sequence: CAG
agacctggggccagtgtgag

SEQ ID NO: 9747 - DNA, 20 bp, Artificial Sequence
  Description of Artificial Sequence: Synthetic oligonucleotide
  Target: APOC3; (+) strand; PAM type: NRG; PAM sequence: AAG
cctggggccagtgtgagcag

SEQ ID NO: 9748 - DNA, 20 bp, Artificial Sequence
  Description of Artificial Sequence: Synthetic oligonucleotide
  Target: APOC3; (+) strand; PAM type: NRG; PAM sequence: CAG
cccatcctgcccctgcccat

SEQ ID NO: 9749 - DNA, 20 bp, Artificial Sequence
  Description of Artificial Sequence: Synthetic oligonucleotide
  Target: APOC3; (+) strand; PAM type: NRG; PAM sequence: TGG
cttctccacctcaccctgac

SEQ ID NO: 9750 - DNA, 20 bp, Artificial Sequence
  Description of Artificial Sequence: Synthetic oligonucleotide
  Target: APOC3; (+) strand; PAM type: NRG; PAM sequence: TAG
cacctcaccctgactggcat

SEQ ID NO: 9751 - DNA, 20 bp, Artificial Sequence
  Description of Artificial Sequence: Synthetic oligonucleotide
  Target: APOC3; (+) strand; PAM type: NRG; PAM sequence: TGG
tcaccctgactggcattagc

SEQ ID NO: 9752 - DNA, 20 bp, Artificial Sequence
  Description of Artificial Sequence: Synthetic oligonucleotide
  Target: APOC3; (+) strand; PAM type: NRG; PAM sequence: TAG
ctgactggcattagctggca

SEQ ID NO: 9753 - DNA, 20 bp, Artificial Sequence
  Description of Artificial Sequence: Synthetic oligonucleotide
  Target: APOC3; (+) strand; PAM type: NRG; PAM sequence: CAG
actggcattagctggcatag

SEQ ID NO: 9754 - DNA, 20 bp, Artificial Sequence
  Description of Artificial Sequence: Synthetic oligonucleotide
  Target: APOC3; (+) strand; PAM type: NRG; PAM sequence: GAG
tggcattagctggcatagca

SEQ ID NO: 9755 - DNA, 20 bp, Artificial Sequence
  Description of Artificial Sequence: Synthetic oligonucleotide
  Target: APOC3; (+) strand; PAM type: NRG; PAM sequence: AGG
ggcattagctggcatagcag

SEQ ID NO: 9756 - DNA, 20 bp, Artificial Sequence
  Description of Artificial Sequence: Synthetic oligonucleotide
  Target: APOC3; (+) strand; PAM type: NRG; PAM sequence: TAG
gaggtgttcataaacattct

SEQ ID NO: 9757 - DNA, 20 bp, Artificial Sequence
  Description of Artificial Sequence: Synthetic oligonucleotide
  Target: APOC3; (+) strand; PAM type: NRG; PAM sequence: CAG
tcataaacattcttagtccc

SEQ ID NO: 9758 - DNA, 20 bp, Artificial Sequence
  Description of Artificial Sequence: Synthetic oligonucleotide
  Target: APOC3; (+) strand; PAM type: NRG; PAM sequence: CGG
acattcttagtccccagaac

SEQ ID NO: 9759 - DNA, 20 bp, Artificial Sequence
  Description of Artificial Sequence: Synthetic oligonucleotide
  Target: APOC3; (+) strand; PAM type: NRG; PAM sequence: TGG
ttagtccccagaaccggctt

SEQ ID NO: 9760 - DNA, 20 bp, Artificial Sequence
  Description of Artificial Sequence: Synthetic oligonucleotide
  Target: APOC3; (+) strand; PAM type: NRG; PAM sequence: GGG
tagtccccagaaccggcttt

SEQ ID NO: 9761 - DNA, 20 bp, Artificial Sequence
  Description of Artificial Sequence: Synthetic oligonucleotide
  Target: APOC3; (+) strand; PAM type: NRG; PAM sequence: GGG
agtccccagaaccggctttg

SEQ ID NO: 9762 - DNA, 20 bp, Artificial Sequence
  Description of Artificial Sequence: Synthetic oligonucleotide
  Target: APOC3; (+) strand; PAM type: NRG; PAM sequence: TAG
ccccagaaccggctttgggg

SEQ ID NO: 9763 - DNA, 20 bp, Artificial Sequence
  Description of Artificial Sequence: Synthetic oligonucleotide
  Target: APOC3; (+) strand; PAM type: NRG; PAM sequence: AGG
cccagaaccggctttggggt

SEQ ID NO: 9764 - DNA, 20 bp, Artificial Sequence
  Description of Artificial Sequence: Synthetic oligonucleotide
  Target: APOC3; (+) strand; PAM type: NRG; PAM sequence: CAG
ggtgttattttctcactttg

SEQ ID NO: 9765 - DNA, 20 bp, Artificial Sequence
  Description of Artificial Sequence: Synthetic oligonucleotide
  Target: APOC3; (+) strand; PAM type: NRG; PAM sequence: GAG
tattttctcactttgcagat

SEQ ID NO: 9766 - DNA, 20 bp, Artificial Sequence
  Description of Artificial Sequence: Synthetic oligonucleotide
  Target: APOC3; (+) strand; PAM type: NRG; PAM sequence: GAG
actttgcagatgagaaaatt

SEQ ID NO: 9767 - DNA, 20 bp, Artificial Sequence
  Description of Artificial Sequence: Synthetic oligonucleotide
  Target: APOC3; (+) strand; PAM type: NRG; PAM sequence: AGG
ctttgcagatgagaaaattg

SEQ ID NO: 9768 - DNA, 20 bp, Artificial Sequence
  Description of Artificial Sequence: Synthetic oligonucleotide
  Target: APOC3; (+) strand; PAM type: NRG; PAM sequence: CAG
cagatgagaaaattgaggct

SEQ ID NO: 9769 - DNA, 20 bp, Artificial Sequence
  Description of Artificial Sequence: Synthetic oligonucleotide
  Target: APOC3; (+) strand; PAM type: NRG; PAM sequence: GAG
gatgagaaaattgaggctca

SEQ ID NO: 9770 - DNA, 20 bp, Artificial Sequence
  Description of Artificial Sequence: Synthetic oligonucleotide
  Target: APOC3; (+) strand; PAM type: NRG; PAM sequence: TAG
aaattgaggctcagagcgat

SEQ ID NO: 9771 - DNA, 20 bp, Artificial Sequence
  Description of Artificial Sequence: Synthetic oligonucleotide
  Target: APOC3; (+) strand; PAM type: NRG; PAM sequence: AGG
aattgaggctcagagcgatt

SEQ ID NO: 9772 - DNA, 20 bp, Artificial Sequence
  Description of Artificial Sequence: Synthetic oligonucleotide
  Target: APOC3; (+) strand; PAM type: NRG; PAM sequence: CAG
agcgattaggtgacctgccc

SEQ ID NO: 9773 - DNA, 20 bp, Artificial Sequence
  Description of Artificial Sequence: Synthetic oligonucleotide
  Target: APOC3; (+) strand; PAM type: NRG; PAM sequence: GAG
cctccaatgactttccaaat

SEQ ID NO: 9774 - DNA, 20 bp, Artificial Sequence
  Description of Artificial Sequence: Synthetic oligonucleotide
  Target: APOC3; (+) strand; PAM type: NRG; PAM sequence: GAG
tccaatgactttccaaatga

SEQ ID NO: 9775 - DNA, 20 bp, Artificial Sequence
  Description of Artificial Sequence: Synthetic oligonucleotide
  Target: APOC3; (+) strand; PAM type: NRG; PAM sequence: AGG
ccaatgactttccaaatgag

SEQ ID NO: 9776 - DNA, 20 bp, Artificial Sequence
  Description of Artificial Sequence: Synthetic oligonucleotide
  Target: APOC3; (+) strand; PAM type: NRG; PAM sequence: CAG
tccctctgtcctaccctgct

SEQ ID NO: 9777 - DNA, 20 bp, Artificial Sequence
  Description of Artificial Sequence: Synthetic oligonucleotide
  Target: APOC3; (+) strand; PAM type: NRG; PAM sequence: GAG
cctctgtcctaccctgctca

SEQ ID NO: 9778 - DNA, 20 bp, Artificial Sequence
  Description of Artificial Sequence: Synthetic oligonucleotide
  Target: APOC3; (+) strand; PAM type: NRG; PAM sequence: CAG
cctaccctgctcagagccac

SEQ ID NO: 9779 - DNA, 20 bp, Artificial Sequence
  Description of Artificial Sequence: Synthetic oligonucleotide
  Target: APOC3; (+) strand; PAM type: NRG; PAM sequence: AGG
ctaccctgctcagagccacc

SEQ ID NO: 9780 - DNA, 20 bp, Artificial Sequence
  Description of Artificial Sequence: Synthetic oligonucleotide
  Target: APOC3; (+) strand; PAM type: NRG; PAM sequence: CAG
gccaccaggttgtgcaactc

SEQ ID NO: 9781 - DNA, 20 bp, Artificial Sequence
  Description of Artificial Sequence: Synthetic oligonucleotide
  Target: APOC3; (+) strand; PAM type: NRG; PAM sequence: AGG
ccaccaggttgtgcaactcc

SEQ ID NO: 9782 - DNA, 20 bp, Artificial Sequence
  Description of Artificial Sequence: Synthetic oligonucleotide
  Target: APOC3; (+) strand; PAM type: NRG; PAM sequence: CGG
ccaggttgtgcaactccagg

SEQ ID NO: 9783 - DNA, 20 bp, Artificial Sequence
  Description of Artificial Sequence: Synthetic oligonucleotide
  Target: APOC3; (+) strand; PAM type: NRG; PAM sequence: CAG
tccaggcggtgctgtttgca

SEQ ID NO: 9784 - DNA, 20 bp, Artificial Sequence
  Description of Artificial Sequence: Synthetic oligonucleotide
  Target: APOC3; (+) strand; PAM type: NRG; PAM sequence: CAG
gtttgcacagaaaacaatga

SEQ ID NO: 9785 - DNA, 20 bp, Artificial Sequence
  Description of Artificial Sequence: Synthetic oligonucleotide
  Target: APOC3; (+) strand; PAM type: NRG; PAM sequence: CAG
caccctgtcactttgtgcct

SEQ ID NO: 9786 - DNA, 20 bp, Artificial Sequence
  Description of Artificial Sequence: Synthetic oligonucleotide
  Target: APOC3; (+) strand; PAM type: NRG; PAM sequence: AGG
accctgtcactttgtgcctc

SEQ ID NO: 9787 - DNA, 20 bp, Artificial Sequence
  Description of Artificial Sequence: Synthetic oligonucleotide
  Target: APOC3; (+) strand; PAM type: NRG; PAM sequence: CAG
gtcactttgtgcctcaggcc

SEQ ID NO: 9788 - DNA, 20 bp, Artificial Sequence
  Description of Artificial Sequence: Synthetic oligonucleotide
  Target: APOC3; (+) strand; PAM type: NRG; PAM sequence: AGG
tcactttgtgcctcaggccc

SEQ ID NO: 9789 - DNA, 20 bp, Artificial Sequence
  Description of Artificial Sequence: Synthetic oligonucleotide
  Target: APOC3; (+) strand; PAM type: NRG; PAM sequence: GGG
cactttgtgcctcaggccca

SEQ ID NO: 9790 - DNA, 20 bp, Artificial Sequence
  Description of Artificial Sequence: Synthetic oligonucleotide
  Target: APOC3; (+) strand; PAM type: NRG; PAM sequence: GGG
actttgtgcctcaggcccag

SEQ ID NO: 9791 - DNA, 20 bp, Artificial Sequence
  Description of Artificial Sequence: Synthetic oligonucleotide
  Target: APOC3; (+) strand; PAM type: NRG; PAM sequence: GAG
gcccaggggcataaacatct

SEQ ID NO: 9792 - DNA, 20 bp, Artificial Sequence
  Description of Artificial Sequence: Synthetic oligonucleotide
  Target: APOC3; (+) strand; PAM type: NRG; PAM sequence: AGG
cccaggggcataaacatctg

SEQ ID NO: 9793 - DNA, 20 bp, Artificial Sequence
  Description of Artificial Sequence: Synthetic oligonucleotide
  Target: APOC3; (+) strand; PAM type: NRG; PAM sequence: TGG
cataaacatctgaggtgacc

SEQ ID NO: 9794 - DNA, 20 bp, Artificial Sequence
  Description of Artificial Sequence: Synthetic oligonucleotide
  Target: APOC3; (+) strand; PAM type: NRG; PAM sequence: GAG
taaacatctgaggtgacctg

SEQ ID NO: 9795 - DNA, 20 bp, Artificial Sequence
  Description of Artificial Sequence: Synthetic oligonucleotide
  Target: APOC3; (+) strand; PAM type: NRG; PAM sequence: TGG
catctgaggtgacctggaga

SEQ ID NO: 9796 - DNA, 20 bp, Artificial Sequence
  Description of Artificial Sequence: Synthetic oligonucleotide
  Target: APOC3; (+) strand; PAM type: NRG; PAM sequence: CAG
ctgaggtgacctggagatgg

SEQ ID NO: 9797 - DNA, 20 bp, Artificial Sequence
  Description of Artificial Sequence: Synthetic oligonucleotide
  Target: APOC3; (+) strand; PAM type: NRG; PAM sequence: AGG
tgaggtgacctggagatggc

SEQ ID NO: 9798 - DNA, 20 bp, Artificial Sequence
  Description of Artificial Sequence: Synthetic oligonucleotide
  Target: APOC3; (+) strand; PAM type: NRG; PAM sequence: GGG
gaggtgacctggagatggca

SEQ ID NO: 9799 - DNA, 20 bp, Artificial Sequence
  Description of Artificial Sequence: Synthetic oligonucleotide
  Target: APOC3; (+) strand; PAM type: NRG; PAM sequence: TGG
tggcagggtttgacttgtgc

SEQ ID NO: 9800 - DNA, 20 bp, Artificial Sequence
  Description of Artificial Sequence: Synthetic oligonucleotide
  Target: APOC3; (+) strand; PAM type: NRG; PAM sequence: GGG
ggcagggtttgacttgtgct

SEQ ID NO: 9801 - DNA, 20 bp, Artificial Sequence
  Description of Artificial Sequence: Synthetic oligonucleotide
  Target: APOC3; (+) strand; PAM type: NRG; PAM sequence: GGG
gcagggtttgacttgtgctg

SEQ ID NO: 9802 - DNA, 20 bp, Artificial Sequence
  Description of Artificial Sequence: Synthetic oligonucleotide
  Target: APOC3; (+) strand; PAM type: NRG; PAM sequence: AAG
acttgtgctggggttcctgc

SEQ ID NO: 9803 - DNA, 20 bp, Artificial Sequence
  Description of Artificial Sequence: Synthetic oligonucleotide
  Target: APOC3; (+) strand; PAM type: NRG; PAM sequence: AGG
cttgtgctggggttcctgca

SEQ ID NO: 9804 - DNA, 20 bp, Artificial Sequence
  Description of Artificial Sequence: Synthetic oligonucleotide
  Target: APOC3; (+) strand; PAM type: NRG; PAM sequence: CAG
tgcaaggatatctcttctcc

SEQ ID NO: 9805 - DNA, 20 bp, Artificial Sequence
  Description of Artificial Sequence: Synthetic oligonucleotide
  Target: APOC3; (+) strand; PAM type: NRG; PAM sequence: AGG
gcaaggatatctcttctccc

SEQ ID NO: 9806 - DNA, 20 bp, Artificial Sequence
  Description of Artificial Sequence: Synthetic oligonucleotide
  Target: APOC3; (+) strand; PAM type: NRG; PAM sequence: GGG
caaggatatctcttctccca

SEQ ID NO: 9807 - DNA, 20 bp, Artificial Sequence
  Description of Artificial Sequence: Synthetic oligonucleotide
  Target: APOC3; (+) strand; PAM type: NRG; PAM sequence: TGG
ggatatctcttctcccaggg

SEQ ID NO: 9808 - DNA, 20 bp, Artificial Sequence
  Description of Artificial Sequence: Synthetic oligonucleotide
  Target: APOC3; (+) strand; PAM type: NRG; PAM sequence: CAG
tatctcttctcccagggtgg

SEQ ID NO: 9809 - DNA, 20 bp, Artificial Sequence
  Description of Artificial Sequence: Synthetic oligonucleotide
  Target: APOC3; (+) strand; PAM type: NRG; PAM sequence: TGG
ttctcccagggtggcagctg

SEQ ID NO: 9810 - DNA, 20 bp, Artificial Sequence
  Description of Artificial Sequence: Synthetic oligonucleotide
  Target: APOC3; (+) strand; PAM type: NRG; PAM sequence: GGG
tctcccagggtggcagctgt

SEQ ID NO: 9811 - DNA, 20 bp, Artificial Sequence
  Description of Artificial Sequence: Synthetic oligonucleotide
  Target: APOC3; (+) strand; PAM type: NRG; PAM sequence: GGG
ctcccagggtggcagctgtg

SEQ ID NO: 9812 - DNA, 20 bp, Artificial Sequence
  Description of Artificial Sequence: Synthetic oligonucleotide
  Target: APOC3; (+) strand; PAM type: NRG; PAM sequence: GGG
tcccagggtggcagctgtgg

SEQ ID NO: 9813 - DNA, 20 bp, Artificial Sequence
  Description of Artificial Sequence: Synthetic oligonucleotide
  Target: APOC3; (+) strand; PAM type: NRG; PAM sequence: GAG
gctgtgggggattcctgcct

SEQ ID NO: 9814 - DNA, 20 bp, Artificial Sequence
  Description of Artificial Sequence: Synthetic oligonucleotide
  Target: APOC3; (+) strand; PAM type: NRG; PAM sequence: AGG
ctgtgggggattcctgcctg

SEQ ID NO: 9815 - DNA, 20 bp, Artificial Sequence
  Description of Artificial Sequence: Synthetic oligonucleotide
  Target: APOC3; (+) strand; PAM type: NRG; PAM sequence: CAG
gggattcctgcctgaggtct

SEQ ID NO: 9816 - DNA, 20 bp, Artificial Sequence
  Description of Artificial Sequence: Synthetic oligonucleotide
  Target: APOC3; (+) strand; PAM type: NRG; PAM sequence: AGG
ggattcctgcctgaggtctc

SEQ ID NO: 9817 - DNA, 20 bp, Artificial Sequence
  Description of Artificial Sequence: Synthetic oligonucleotide
  Target: APOC3; (+) strand; PAM type: NRG; PAM sequence: GGG
gattcctgcctgaggtctca

SEQ ID NO: 9818 - DNA, 20 bp, Artificial Sequence
  Description of Artificial Sequence: Synthetic oligonucleotide
  Target: APOC3; (+) strand; PAM type: NRG; PAM sequence: CAG
gaggtctcagggctgtcgtc

SEQ ID NO: 9819 - DNA, 20 bp, Artificial Sequence
  Description of Artificial Sequence: Synthetic oligonucleotide
  Target: APOC3; (+) strand; PAM type: NRG; PAM sequence: AAG
ctcagggctgtcgtccagtg

SEQ ID NO: 9820 - DNA, 20 bp, Artificial Sequence
  Description of Artificial Sequence: Synthetic oligonucleotide
  Target: APOC3; (+) strand; PAM type: NRG; PAM sequence: GAG
ggctgtcgtccagtgaagtt

SEQ ID NO: 9821 - DNA, 20 bp, Artificial Sequence
  Description of Artificial Sequence: Synthetic oligonucleotide
  Target: APOC3; (+) strand; PAM type: NRG; PAM sequence: GAG
ctgtcgtccagtgaagttga

SEQ ID NO: 9822 - DNA, 20 bp, Artificial Sequence
  Description of Artificial Sequence: Synthetic oligonucleotide
  Target: APOC3; (+) strand; PAM type: NRG; PAM sequence: AGG
tgtcgtccagtgaagttgag

SEQ ID NO: 9823 - DNA, 20 bp, Artificial Sequence
  Description of Artificial Sequence: Synthetic oligonucleotide
  Target: APOC3; (+) strand; PAM type: NRG; PAM sequence: GGG
gtcgtccagtgaagttgaga

SEQ ID NO: 9824 - DNA, 20 bp, Artificial Sequence
  Description of Artificial Sequence: Synthetic oligonucleotide
  Target: APOC3; (+) strand; PAM type: NRG; PAM sequence: TGG
gtccagtgaagttgagaggg

SEQ ID NO: 9825 - DNA, 20 bp, Artificial Sequence
  Description of Artificial Sequence: Synthetic oligonucleotide
  Target: APOC3; (+) strand; PAM type: NRG; PAM sequence: TGG
gtgaagttgagagggtggtg

SEQ ID NO: 9826 - DNA, 20 bp, Artificial Sequence
  Description of Artificial Sequence: Synthetic oligonucleotide
  Target: APOC3; (+) strand; PAM type: NRG; PAM sequence: TGG
gagggtggtgtggtcctgac

SEQ ID NO: 9827 - DNA, 20 bp, Artificial Sequence
  Description of Artificial Sequence: Synthetic oligonucleotide
  Target: APOC3; (+) strand; PAM type: NRG; PAM sequence: CAG
tggtcctgactggtgtcgtc

SEQ ID NO: 9828 - DNA, 20 bp, Artificial Sequence
  Description of Artificial Sequence: Synthetic oligonucleotide
  Target: APOC3; (+) strand; PAM type: NRG; PAM sequence: TGG
tcctgactggtgtcgtccag

SEQ ID NO: 9829 - DNA, 20 bp, Artificial Sequence
  Description of Artificial Sequence: Synthetic oligonucleotide
  Target: APOC3; (+) strand; PAM type: NRG; PAM sequence: GGG
cctgactggtgtcgtccagt

SEQ ID NO: 9830 - DNA, 20 bp, Artificial Sequence
  Description of Artificial Sequence: Synthetic oligonucleotide
  Target: APOC3; (+) strand; PAM type: NRG; PAM sequence: GGG
ctgactggtgtcgtccagtg

SEQ ID NO: 9831 - DNA, 20 bp, Artificial Sequence
  Description of Artificial Sequence: Synthetic oligonucleotide
  Target: APOC3; (+) strand; PAM type: NRG; PAM sequence: TGG
ggtgtcgtccagtggggaca

SEQ ID NO: 9832 - DNA, 20 bp, Artificial Sequence
  Description of Artificial Sequence: Synthetic oligonucleotide
  Target: APOC3; (+) strand; PAM type: NRG; PAM sequence: GGG
gtgtcgtccagtggggacat

SEQ ID NO: 9833 - DNA, 20 bp, Artificial Sequence
  Description of Artificial Sequence: Synthetic oligonucleotide
  Target: APOC3; (+) strand; PAM type: NRG; PAM sequence: TGG
gtccagtggggacatgggtg

SEQ ID NO: 9834 - DNA, 20 bp, Artificial Sequence
  Description of Artificial Sequence: Synthetic oligonucleotide
  Target: APOC3; (+) strand; PAM type: NRG; PAM sequence: GGG
tccagtggggacatgggtgt

SEQ ID NO: 9835 - DNA, 20 bp, Artificial Sequence
  Description of Artificial Sequence: Synthetic oligonucleotide
  Target: APOC3; (+) strand; PAM type: NRG; PAM sequence: TGG
ggacatgggtgtgggtccca

SEQ ID NO: 9836 - DNA, 20 bp, Artificial Sequence
  Description of Artificial Sequence: Synthetic oligonucleotide
  Target: APOC3; (+) strand; PAM type: NRG; PAM sequence: CAG
gtgggtcccatggttgccta

SEQ ID NO: 9837 - DNA, 20 bp, Artificial Sequence
  Description of Artificial Sequence: Synthetic oligonucleotide
  Target: APOC3; (+) strand; PAM type: NRG; PAM sequence: GAG
gggtcccatggttgcctaca

SEQ ID NO: 9838 - DNA, 20 bp, Artificial Sequence
  Description of Artificial Sequence: Synthetic oligonucleotide
  Target: APOC3; (+) strand; PAM type: NRG; PAM sequence: AGG
ggtcccatggttgcctacag

SEQ ID NO: 9839 - DNA, 20 bp, Artificial Sequence
  Description of Artificial Sequence: Synthetic oligonucleotide
  Target: APOC3; (+) strand; PAM type: NRG; PAM sequence: GAG
tcccatggttgcctacagag

SEQ ID NO: 9840 - DNA, 20 bp, Artificial Sequence
  Description of Artificial Sequence: Synthetic oligonucleotide
  Target: APOC3; (+) strand; PAM type: NRG; PAM sequence: TAG
gttgcttcccctgactgatt

SEQ ID NO: 9841 - DNA, 20 bp, Artificial Sequence
  Description of Artificial Sequence: Synthetic oligonucleotide
  Target: APOC3; (+) strand; PAM type: NRG; PAM sequence: AGG
ttgcttcccctgactgattt

SEQ ID NO: 9842 - DNA, 20 bp, Artificial Sequence
  Description of Artificial Sequence: Synthetic oligonucleotide
  Target: APOC3; (+) strand; PAM type: NRG; PAM sequence: GGG
tgcttcccctgactgattta

SEQ ID NO: 9843 - DNA, 20 bp, Artificial Sequence
  Description of Artificial Sequence: Synthetic oligonucleotide
  Target: APOC3; (+) strand; PAM type: NRG; PAM sequence: GGG
gcttcccctgactgatttag

SEQ ID NO: 9844 - DNA, 20 bp, Artificial Sequence
  Description of Artificial Sequence: Synthetic oligonucleotide
  Target: APOC3; (+) strand; PAM type: NRG; PAM sequence: TGG
cccctgactgatttaggggc

SEQ ID NO: 9845 - DNA, 20 bp, Artificial Sequence
  Description of Artificial Sequence: Synthetic oligonucleotide
  Target: APOC3; (+) strand; PAM type: NRG; PAM sequence: GGG
ccctgactgatttaggggct

SEQ ID NO: 9846 - DNA, 20 bp, Artificial Sequence
  Description of Artificial Sequence: Synthetic oligonucleotide
  Target: APOC3; (+) strand; PAM type: NRG; PAM sequence: TGG
tttaggggctgggtgaccga

SEQ ID NO: 9847 - DNA, 20 bp, Artificial Sequence
  Description of Artificial Sequence: Synthetic oligonucleotide
  Target: APOC3; (+) strand; PAM type: NRG; PAM sequence: CAG
ggctgggtgaccgatggctt

SEQ ID NO: 9848 - DNA, 20 bp, Artificial Sequence
  Description of Artificial Sequence: Synthetic oligonucleotide
  Target: APOC3; (+) strand; PAM type: NRG; PAM sequence: AAG
cgatggcttcagttccctga

SEQ ID NO: 9849 - DNA, 20 bp, Artificial Sequence
  Description of Artificial Sequence: Synthetic oligonucleotide
  Target: APOC3; (+) strand; PAM type: NRG; PAM sequence: TGG
tcagttccctgaaagactac

SEQ ID NO: 9850 - DNA, 20 bp, Artificial Sequence
  Description of Artificial Sequence: Synthetic oligonucleotide
  Target: APOC3; (+) strand; PAM type: NRG; PAM sequence: GAG
agttccctgaaagactactg

SEQ ID NO: 9851 - DNA, 20 bp, Artificial Sequence
  Description of Artificial Sequence: Synthetic oligonucleotide
  Target: APOC3; (+) strand; PAM type: NRG; PAM sequence: AAG
aagactactggagcaccgtt

SEQ ID NO: 9852 - DNA, 20 bp, Artificial Sequence
  Description of Artificial Sequence: Synthetic oligonucleotide
  Target: APOC3; (+) strand; PAM type: NRG; PAM sequence: AGG
agactactggagcaccgtta

SEQ ID NO: 9853 - DNA, 20 bp, Artificial Sequence
  Description of Artificial Sequence: Synthetic oligonucleotide
  Target: APOC3; (+) strand; PAM type: NRG; PAM sequence: AAG
actggagcaccgttaaggac

SEQ ID NO: 9854 - DNA, 20 bp, Artificial Sequence
  Description of Artificial Sequence: Synthetic oligonucleotide
  Target: APOC3; (+) strand; PAM type: NRG; PAM sequence: GAG
ccgttaaggacaagttctct

SEQ ID NO: 9855 - DNA, 20 bp, Artificial Sequence
  Description of Artificial Sequence: Synthetic oligonucleotide
  Target: APOC3; (+) strand; PAM type: NRG; PAM sequence: TGG
aggacaagttctctgagttc

SEQ ID NO: 9856 - DNA, 20 bp, Artificial Sequence
  Description of Artificial Sequence: Synthetic oligonucleotide
  Target: APOC3; (+) strand; PAM type: NRG; PAM sequence: GGG
ggacaagttctctgagttct

SEQ ID NO: 9857 - DNA, 20 bp, Artificial Sequence
  Description of Artificial Sequence: Synthetic oligonucleotide
  Target: APOC3; (+) strand; PAM type: NRG; PAM sequence: TGG
gttctctgagttctgggatt

SEQ ID NO: 9858 - DNA, 20 bp, Artificial Sequence
  Description of Artificial Sequence: Synthetic oligonucleotide
  Target: APOC3; (+) strand; PAM type: NRG; PAM sequence: GAG
agttctgggatttggaccct

SEQ ID NO: 9859 - DNA, 20 bp, Artificial Sequence
  Description of Artificial Sequence: Synthetic oligonucleotide
  Target: APOC3; (+) strand; PAM type: NRG; PAM sequence: AGG
gttctgggatttggaccctg

SEQ ID NO: 9860 - DNA, 20 bp, Artificial Sequence
  Description of Artificial Sequence: Synthetic oligonucleotide
  Target: APOC3; (+) strand; PAM type: NRG; PAM sequence: CAG
tgggatttggaccctgaggt

SEQ ID NO: 9861 - DNA, 20 bp, Artificial Sequence
  Description of Artificial Sequence: Synthetic oligonucleotide
  Target: APOC3; (+) strand; PAM type: NRG; PAM sequence: CAG
ccctgaggtcagaccaactt

SEQ ID NO: 9862 - DNA, 20 bp, Artificial Sequence
  Description of Artificial Sequence: Synthetic oligonucleotide
  Target: APOC3; (+) strand; PAM type: NRG; PAM sequence: TGG
ggtcagaccaacttcagccg

SEQ ID NO: 9863 - DNA, 20 bp, Artificial Sequence
  Description of Artificial Sequence: Synthetic oligonucleotide
  Target: APOC3; (+) strand; PAM type: NRG; PAM sequence: GAG
aacttcagccgtggctgcct

SEQ ID NO: 9864 - DNA, 20 bp, Artificial Sequence
  Description of Artificial Sequence: Synthetic oligonucleotide
  Target: APOC3; (+) strand; PAM type: NRG; PAM sequence: AAG
gcctgagacctcaatacccc

SEQ ID NO: 9865 - DNA, 20 bp, Artificial Sequence
  Description of Artificial Sequence: Synthetic oligonucleotide
  Target: APOC3; (+) strand; PAM type: NRG; PAM sequence: GAG
cacctgcctatccatcctgc

SEQ ID NO: 9866 - DNA, 20 bp, Artificial Sequence
  Description of Artificial Sequence: Synthetic oligonucleotide
  Target: APOC3; (+) strand; PAM type: NRG; PAM sequence: TGG
tatccatcctgcgagctcct

SEQ ID NO: 9867 - DNA, 20 bp, Artificial Sequence
  Description of Artificial Sequence: Synthetic oligonucleotide
  Target: APOC3; (+) strand; PAM type: NRG; PAM sequence: GGG
atccatcctgcgagctcctt

SEQ ID NO: 9868 - DNA, 20 bp, Artificial Sequence
  Description of Artificial Sequence: Synthetic oligonucleotide
  Target: APOC3; (+) strand; PAM type: NRG; PAM sequence: CAG
tccttgggtcctgcaatctc

SEQ ID NO: 9869 - DNA, 20 bp, Artificial Sequence
  Description of Artificial Sequence: Synthetic oligonucleotide
  Target: APOC3; (+) strand; PAM type: NRG; PAM sequence: AGG
ccttgggtcctgcaatctcc

SEQ ID NO: 9870 - DNA, 20 bp, Artificial Sequence
  Description of Artificial Sequence: Synthetic oligonucleotide
  Target: APOC3; (+) strand; PAM type: NRG; PAM sequence: GGG
cttgggtcctgcaatctcca

SEQ ID NO: 9871 - DNA, 20 bp, Artificial Sequence
  Description of Artificial Sequence: Synthetic oligonucleotide
  Target: APOC3; (+) strand; PAM type: NRG; PAM sequence: TAG
aatctccagggctgcccctg

SEQ ID NO: 9872 - DNA, 20 bp, Artificial Sequence
  Description of Artificial Sequence: Synthetic oligonucleotide
  Target: APOC3; (+) strand; PAM type: NRG; PAM sequence: AGG
atctccagggctgcccctgt

SEQ ID NO: 9873 - DNA, 20 bp, Artificial Sequence
  Description of Artificial Sequence: Synthetic oligonucleotide
  Target: APOC3; (+) strand; PAM type: NRG; PAM sequence: AAG
tgcccctgtaggttgcttaa

SEQ ID NO: 9874 - DNA, 20 bp, Artificial Sequence
  Description of Artificial Sequence: Synthetic oligonucleotide
  Target: APOC3; (+) strand; PAM type: NRG; PAM sequence: AGG
gcccctgtaggttgcttaaa

SEQ ID NO: 9875 - DNA, 20 bp, Artificial Sequence
  Description of Artificial Sequence: Synthetic oligonucleotide
  Target: APOC3; (+) strand; PAM type: NRG; PAM sequence: GGG
cccctgtaggttgcttaaaa

SEQ ID NO: 9876 - DNA, 20 bp, Artificial Sequence
  Description of Artificial Sequence: Synthetic oligonucleotide
  Target: APOC3; (+) strand; PAM type: NRG; PAM sequence: CAG
tgtaggttgcttaaaaggga

SEQ ID NO: 9877 - DNA, 20 bp, Artificial Sequence
  Description of Artificial Sequence: Synthetic oligonucleotide
  Target: APOC3; (+) strand; PAM type: NRG; PAM sequence: CAG
cttaaaagggacagtattct

SEQ ID NO: 9878 - DNA, 20 bp, Artificial Sequence
  Description of Artificial Sequence: Synthetic oligonucleotide
  Target: APOC3; (+) strand; PAM type: NRG; PAM sequence: TGG
ctcctaccccacctcatgcc

SEQ ID NO: 9879 - DNA, 20 bp, Artificial Sequence
  Description of Artificial Sequence: Synthetic oligonucleotide
  Target: APOC3; (+) strand; PAM type: NRG; PAM sequence: CAG
cctcatgcctggcccccctc

SEQ ID NO: 9880 - DNA, 20 bp, Artificial Sequence
  Description of Artificial Sequence: Synthetic oligonucleotide
  Target: APOC3; (+) strand; PAM type: NRG; PAM sequence: AGG
ctcatgcctggcccccctcc

SEQ ID NO: 9881 - DNA, 20 bp, Artificial Sequence
  Description of Artificial Sequence: Synthetic oligonucleotide
  Target: APOC3; (+) strand; PAM type: NRG; PAM sequence: TGG
tggcccccctccaggcatgc

SEQ ID NO: 9882 - DNA, 20 bp, Artificial Sequence
  Description of Artificial Sequence: Synthetic oligonucleotide
  Target: APOC3; (+) strand; PAM type: NRG; PAM sequence: AAG
ggcatgctggcctcccaata

SEQ ID NO: 9883 - DNA, 20 bp, Artificial Sequence
  Description of Artificial Sequence: Synthetic oligonucleotide
  Target: APOC3; (+) strand; PAM type: NRG; PAM sequence: TGG
tgctggcctcccaataaagc

SEQ ID NO: 9884 - DNA, 20 bp, Artificial Sequence
  Description of Artificial Sequence: Synthetic oligonucleotide
  Target: APOC3; (+) strand; PAM type: NRG; PAM sequence: AAG
gcctcccaataaagctggac

SEQ ID NO: 9885 - DNA, 20 bp, Artificial Sequence
  Description of Artificial Sequence: Synthetic oligonucleotide
  Target: APOC3; (+) strand; PAM type: NRG; PAM sequence: AAG
tcccaataaagctggacaag

SEQ ID NO: 9886 - DNA, 20 bp, Artificial Sequence
  Description of Artificial Sequence: Synthetic oligonucleotide
  Target: APOC3; (+) strand; PAM type: NRG; PAM sequence: GAG
gctggacaagaagctgctat

SEQ ID NO: 9887 - DNA, 20 bp, Artificial Sequence
  Description of Artificial Sequence: Synthetic oligonucleotide
  Target: APOC3; (+) strand; PAM type: NRG; PAM sequence: TGG
ggacaagaagctgctatgag

SEQ ID NO: 9888 - DNA, 20 bp, Artificial Sequence
  Description of Artificial Sequence: Synthetic oligonucleotide
  Target: APOC3; (+) strand; PAM type: NRG; PAM sequence: GGG
gacaagaagctgctatgagt

SEQ ID NO: 9889 - DNA, 20 bp, Artificial Sequence
  Description of Artificial Sequence: Synthetic oligonucleotide
  Target: APOC3; (+) strand; PAM type: NRG; PAM sequence: AAG
tgctatgagtgggccgtcgc

SEQ ID NO: 9890 - DNA, 20 bp, Artificial Sequence
  Description of Artificial Sequence: Synthetic oligonucleotide
  Target: APOC3; (+) strand; PAM type: NRG; PAM sequence: TGG
gcaagtgtgccatctgtgtc

SEQ ID NO: 9891 - DNA, 20 bp, Artificial Sequence
  Description of Artificial Sequence: Synthetic oligonucleotide
  Target: APOC3; (+) strand; PAM type: NRG; PAM sequence: GGG
caagtgtgccatctgtgtct

SEQ ID NO: 9892 - DNA, 20 bp, Artificial Sequence
  Description of Artificial Sequence: Synthetic oligonucleotide
  Target: APOC3; (+) strand; PAM type: NRG; PAM sequence: TGG
gtgccatctgtgtctgggca

SEQ ID NO: 9893 - DNA, 20 bp, Artificial Sequence
  Description of Artificial Sequence: Synthetic oligonucleotide
  Target: APOC3; (+) strand; PAM type: NRG; PAM sequence: GGG
tgccatctgtgtctgggcat

SEQ ID NO: 9894 - DNA, 20 bp, Artificial Sequence
  Description of Artificial Sequence: Synthetic oligonucleotide
  Target: APOC3; (+) strand; PAM type: NRG; PAM sequence: AAG
atctgtgtctgggcatggga

SEQ ID NO: 9895 - DNA, 20 bp, Artificial Sequence
  Description of Artificial Sequence: Synthetic oligonucleotide
  Target: APOC3; (+) strand; PAM type: NRG; PAM sequence: AGG
tctgtgtctgggcatgggaa

SEQ ID NO: 9896 - DNA, 20 bp, Artificial Sequence
  Description of Artificial Sequence: Synthetic oligonucleotide
  Target: APOC3; (+) strand; PAM type: NRG; PAM sequence: GGG
ctgtgtctgggcatgggaaa

SEQ ID NO: 9897 - DNA, 20 bp, Artificial Sequence
  Description of Artificial Sequence: Synthetic oligonucleotide
  Target: APOC3; (+) strand; PAM type: NRG; PAM sequence: GAG
tctgggcatgggaaagggcc

SEQ ID NO: 9898 - DNA, 20 bp, Artificial Sequence
  Description of Artificial Sequence: Synthetic oligonucleotide
  Target: APOC3; (+) strand; PAM type: NRG; PAM sequence: AGG
ctgggcatgggaaagggccg

SEQ ID NO: 9899 - DNA, 20 bp, Artificial Sequence
  Description of Artificial Sequence: Synthetic oligonucleotide
  Target: APOC3; (+) strand; PAM type: NRG; PAM sequence: TGG
aaagggccgaggctgttctg

SEQ ID NO: 9900 - DNA, 20 bp, Artificial Sequence
  Description of Artificial Sequence: Synthetic oligonucleotide
  Target: APOC3; (+) strand; PAM type: NRG; PAM sequence: GGG
aagggccgaggctgttctgt

SEQ ID NO: 9901 - DNA, 20 bp, Artificial Sequence
  Description of Artificial Sequence: Synthetic oligonucleotide
  Target: APOC3; (+) strand; PAM type: NRG; PAM sequence: TGG
ggccgaggctgttctgtggg

SEQ ID NO: 9902 - DNA, 20 bp, Artificial Sequence
  Description of Artificial Sequence: Synthetic oligonucleotide
  Target: APOC3; (+) strand; PAM type: NRG; PAM sequence: GGG
gccgaggctgttctgtgggt

SEQ ID NO: 9903 - DNA, 20 bp, Artificial Sequence
  Description of Artificial Sequence: Synthetic oligonucleotide
  Target: APOC3; (+) strand; PAM type: NRG; PAM sequence: TGG
gctgttctgtgggtgggcac

SEQ ID NO: 9904 - DNA, 20 bp, Artificial Sequence
  Description of Artificial Sequence: Synthetic oligonucleotide
  Target: APOC3; (+) strand; PAM type: NRG; PAM sequence: CAG
ttctgtgggtgggcactgga

SEQ ID NO: 9905 - DNA, 20 bp, Artificial Sequence
  Description of Artificial Sequence: Synthetic oligonucleotide
  Target: APOC3; (+) strand; PAM type: NRG; PAM sequence: CAG
ggtgggcactggacagactc

SEQ ID NO: 9906 - DNA, 20 bp, Artificial Sequence
  Description of Artificial Sequence: Synthetic oligonucleotide
  Target: APOC3; (+) strand; PAM type: NRG; PAM sequence: AGG
gtgggcactggacagactcc

SEQ ID NO: 9907 - DNA, 20 bp, Artificial Sequence
  Description of Artificial Sequence: Synthetic oligonucleotide
  Target: APOC3; (+) strand; PAM type: NRG; PAM sequence: CAG
gcactggacagactccaggt

SEQ ID NO: 9908 - DNA, 20 bp, Artificial Sequence
  Description of Artificial Sequence: Synthetic oligonucleotide
  Target: APOC3; (+) strand; PAM type: NRG; PAM sequence: AGG
cactggacagactccaggtc

SEQ ID NO: 9909 - DNA, 20 bp, Artificial Sequence
  Description of Artificial Sequence: Synthetic oligonucleotide
  Target: APOC3; (+) strand; PAM type: NRG; PAM sequence: CAG
tggacagactccaggtcagg

SEQ ID NO: 9910 - DNA, 20 bp, Artificial Sequence
  Description of Artificial Sequence: Synthetic oligonucleotide
  Target: APOC3; (+) strand; PAM type: NRG; PAM sequence: AGG
ggacagactccaggtcaggc

SEQ ID NO: 9911 - DNA, 20 bp, Artificial Sequence
  Description of Artificial Sequence: Synthetic oligonucleotide
  Target: APOC3; (+) strand; PAM type: NRG; PAM sequence: TGG
gactccaggtcaggcaggca

SEQ ID NO: 9912 - DNA, 20 bp, Artificial Sequence
  Description of Artificial Sequence: Synthetic oligonucleotide
  Target: APOC3; (+) strand; PAM type: NRG; PAM sequence: GAG
ctccaggtcaggcaggcatg

SEQ ID NO: 9913 - DNA, 20 bp, Artificial Sequence
  Description of Artificial Sequence: Synthetic oligonucleotide
  Target: APOC3; (+) strand; PAM type: NRG; PAM sequence: AGG
tccaggtcaggcaggcatgg

SEQ ID NO: 9914 - DNA, 20 bp, Artificial Sequence
  Description of Artificial Sequence: Synthetic oligonucleotide
  Target: APOC3; (+) strand; PAM type: NRG; PAM sequence: CAG
ggtcaggcaggcatggaggc

SEQ ID NO: 9915 - DNA, 20 bp, Artificial Sequence
  Description of Artificial Sequence: Synthetic oligonucleotide
  Target: APOC3; (+) strand; PAM type: NRG; PAM sequence: TGG
ccagcgctctatccaccttc

SEQ ID NO: 9916 - DNA, 20 bp, Artificial Sequence
  Description of Artificial Sequence: Synthetic oligonucleotide
  Target: APOC3; (+) strand; PAM type: NRG; PAM sequence: TAG
gcgctctatccaccttctgg

SEQ ID NO: 9917 - DNA, 20 bp, Artificial Sequence
  Description of Artificial Sequence: Synthetic oligonucleotide
  Target: APOC3; (+) strand; PAM type: NRG; PAM sequence: TGG
tctatccaccttctggtagc

SEQ ID NO: 9918 - DNA, 20 bp, Artificial Sequence
  Description of Artificial Sequence: Synthetic oligonucleotide
  Target: APOC3; (+) strand; PAM type: NRG; PAM sequence: GGG
ctatccaccttctggtagct

SEQ ID NO: 9919 - DNA, 20 bp, Artificial Sequence
  Description of Artificial Sequence: Synthetic oligonucleotide
  Target: APOC3; (+) strand; PAM type: NRG; PAM sequence: CAG
tccaccttctggtagctggg

SEQ ID NO: 9920 - DNA, 20 bp, Artificial Sequence
  Description of Artificial Sequence: Synthetic oligonucleotide
  Target: APOC3; (+) strand; PAM type: NRG; PAM sequence: TGG
tctggtagctgggcagtctc

SEQ ID NO: 9921 - DNA, 20 bp, Artificial Sequence
  Description of Artificial Sequence: Synthetic oligonucleotide
  Target: APOC3; (+) strand; PAM type: NRG; PAM sequence: GGG
ctggtagctgggcagtctct

SEQ ID NO: 9922 - DNA, 20 bp, Artificial Sequence
  Description of Artificial Sequence: Synthetic oligonucleotide
  Target: APOC3; (+) strand; PAM type: NRG; PAM sequence: CAG
gctgggcagtctctgggcct

SEQ ID NO: 9923 - DNA, 20 bp, Artificial Sequence
  Description of Artificial Sequence: Synthetic oligonucleotide
  Target: APOC3; (+) strand; PAM type: NRG; PAM sequence: AAG
gcctcagtttcttcatctct

SEQ ID NO: 9924 - DNA, 20 bp, Artificial Sequence
  Description of Artificial Sequence: Synthetic oligonucleotide
  Target: APOC3; (+) strand; PAM type: NRG; PAM sequence: AGG
cctcagtttcttcatctcta

SEQ ID NO: 9925 - DNA, 20 bp, Artificial Sequence
  Description of Artificial Sequence: Synthetic oligonucleotide
  Target: APOC3; (+) strand; PAM type: NRG; PAM sequence: TAG
cagtttcttcatctctaagg

SEQ ID NO: 9926 - DNA, 20 bp, Artificial Sequence
  Description of Artificial Sequence: Synthetic oligonucleotide
  Target: APOC3; (+) strand; PAM type: NRG; PAM sequence: AGG
agtttcttcatctctaaggt

SEQ ID NO: 9927 - DNA, 20 bp, Artificial Sequence
  Description of Artificial Sequence: Synthetic oligonucleotide
  Target: APOC3; (+) strand; PAM type: NRG; PAM sequence: CAG
ccgtaccctgccttccttga

SEQ ID NO: 9928 - DNA, 20 bp, Artificial Sequence
  Description of Artificial Sequence: Synthetic oligonucleotide
  Target: APOC3; (+) strand; PAM type: NRG; PAM sequence: CGG
ccttccttgacagctttgtg

SEQ ID NO: 9929 - DNA, 20 bp, Artificial Sequence
  Description of Artificial Sequence: Synthetic oligonucleotide
  Target: APOC3; (+) strand; PAM type: NRG; PAM sequence: AAG
tccttgacagctttgtgcgg

SEQ ID NO: 9930 - DNA, 20 bp, Artificial Sequence
  Description of Artificial Sequence: Synthetic oligonucleotide
  Target: APOC3; (+) strand; PAM type: NRG; PAM sequence: AGG
ccttgacagctttgtgcgga

SEQ ID NO: 9931 - DNA, 20 bp, Artificial Sequence
  Description of Artificial Sequence: Synthetic oligonucleotide
  Target: APOC3; (+) strand; PAM type: NRG; PAM sequence: CAG
gctttgtgcggaaggtcaaa

SEQ ID NO: 9932 - DNA, 20 bp, Artificial Sequence
  Description of Artificial Sequence: Synthetic oligonucleotide
  Target: APOC3; (+) strand; PAM type: NRG; PAM sequence: AGG
ctttgtgcggaaggtcaaac

SEQ ID NO: 9933 - DNA, 20 bp, Artificial Sequence
  Description of Artificial Sequence: Synthetic oligonucleotide
  Target: APOC3; (+) strand; PAM type: NRG; PAM sequence: AAG
ggaaggtcaaacaggacaat

SEQ ID NO: 9934 - DNA, 20 bp, Artificial Sequence
  Description of Artificial Sequence: Synthetic oligonucleotide
  Target: APOC3; (+) strand; PAM type: NRG; PAM sequence: TAG
ctgatactttgataaactgt

SEQ ID NO: 9935 - DNA, 20 bp, Artificial Sequence
  Description of Artificial Sequence: Synthetic oligonucleotide
  Target: APOC3; (+) strand; PAM type: NRG; PAM sequence: AGG
tgatactttgataaactgtt

SEQ ID NO: 9936 - DNA, 20 bp, Artificial Sequence
  Description of Artificial Sequence: Synthetic oligonucleotide
  Target: APOC3; (+) strand; PAM type: NRG; PAM sequence: GAG
ggtgctgcacaacatgactt

SEQ ID NO: 9937 - DNA, 20 bp, Artificial Sequence
  Description of Artificial Sequence: Synthetic oligonucleotide
  Target: APOC3; (+) strand; PAM type: NRG; PAM sequence: CAG
cttgagtgtgtgccccatgc

SEQ ID NO: 9938 - DNA, 20 bp, Artificial Sequence
  Description of Artificial Sequence: Synthetic oligonucleotide
  Target: APOC3; (+) strand; PAM type: NRG; PAM sequence: TGG
cccatgccagccactatgcc

SEQ ID NO: 9939 - DNA, 20 bp, Artificial Sequence
  Description of Artificial Sequence: Synthetic oligonucleotide
  Target: APOC3; (+) strand; PAM type: NRG; PAM sequence: AAG
agccactatgcctggcactt

SEQ ID NO: 9940 - DNA, 20 bp, Artificial Sequence
  Description of Artificial Sequence: Synthetic oligonucleotide
  Target: APOC3; (+) strand; PAM type: NRG; PAM sequence: CAG
cctggcacttaagttgtcat

SEQ ID NO: 9941 - DNA, 20 bp, Artificial Sequence
  Description of Artificial Sequence: Synthetic oligonucleotide
  Target: APOC3; (+) strand; PAM type: NRG; PAM sequence: GAG
tggcacttaagttgtcatca

SEQ ID NO: 9942 - DNA, 20 bp, Artificial Sequence
  Description of Artificial Sequence: Synthetic oligonucleotide
  Target: APOC3; (+) strand; PAM type: NRG; PAM sequence: GAG
cttaagttgtcatcagagtt

SEQ ID NO: 9943 - DNA, 20 bp, Artificial Sequence
  Description of Artificial Sequence: Synthetic oligonucleotide
  Target: APOC3; (+) strand; PAM type: NRG; PAM sequence: TGG
tgtgtgtttactcaaaactg

SEQ ID NO: 9944 - DNA, 20 bp, Artificial Sequence
  Description of Artificial Sequence: Synthetic oligonucleotide
  Target: APOC3; (+) strand; PAM type: NRG; PAM sequence: GAG
tgtgtttactcaaaactgtg

SEQ ID NO: 9945 - DNA, 20 bp, Artificial Sequence
  Description of Artificial Sequence: Synthetic oligonucleotide
  Target: APOC3; (+) strand; PAM type: NRG; PAM sequence: CAG
tggagctgacctcccctatc

SEQ ID NO: 9946 - DNA, 20 bp, Artificial Sequence
  Description of Artificial Sequence: Synthetic oligonucleotide
  Target: APOC3; (+) strand; PAM type: NRG; PAM sequence: AGG
ggagctgacctcccctatcc

SEQ ID NO: 9947 - DNA, 20 bp, Artificial Sequence
  Description of Artificial Sequence: Synthetic oligonucleotide
  Target: APOC3; (+) strand; PAM type: NRG; PAM sequence: TAG
cctcccctatccaggccccc

SEQ ID NO: 9948 - DNA, 20 bp, Artificial Sequence
  Description of Artificial Sequence: Synthetic oligonucleotide
  Target: APOC3; (+) strand; PAM type: NRG; PAM sequence: TAG
tccaggccccctagccctct

SEQ ID NO: 9949 - DNA, 20 bp, Artificial Sequence
  Description of Artificial Sequence: Synthetic oligonucleotide
  Target: APOC3; (+) strand; PAM type: NRG; PAM sequence: AGG
ccaggccccctagccctctt

SEQ ID NO: 9950 - DNA, 20 bp, Artificial Sequence
  Description of Artificial Sequence: Synthetic oligonucleotide
  Target: APOC3; (+) strand; PAM type: NRG; PAM sequence: AAG
agccctcttaggcgcacgtg

SEQ ID NO: 9951 - DNA, 20 bp, Artificial Sequence
  Description of Artificial Sequence: Synthetic oligonucleotide
  Target: APOC3; (+) strand; PAM type: NRG; PAM sequence: AGG
gccctcttaggcgcacgtga

SEQ ID NO: 9952 - DNA, 20 bp, Artificial Sequence
  Description of Artificial Sequence: Synthetic oligonucleotide
  Target: APOC3; (+) strand; PAM type: NRG; PAM sequence: GGG
ccctcttaggcgcacgtgaa

SEQ ID NO: 9953 - DNA, 20 bp, Artificial Sequence
  Description of Artificial Sequence: Synthetic oligonucleotide
  Target: APOC3; (+) strand; PAM type: NRG; PAM sequence: GAG
ctcttaggcgcacgtgaagg

SEQ ID NO: 9954 - DNA, 20 bp, Artificial Sequence
  Description of Artificial Sequence: Synthetic oligonucleotide
  Target: APOC3; (+) strand; PAM type: NRG; PAM sequence: AGG
tcttaggcgcacgtgaaggg

SEQ ID NO: 9955 - DNA, 20 bp, Artificial Sequence
  Description of Artificial Sequence: Synthetic oligonucleotide
  Target: APOC3; (+) strand; PAM type: NRG; PAM sequence: GAG
ttaggcgcacgtgaagggag

SEQ ID NO: 9956 - DNA, 20 bp, Artificial Sequence
  Description of Artificial Sequence: Synthetic oligonucleotide
  Target: APOC3; (+) strand; PAM type: NRG; PAM sequence: AGG
taggcgcacgtgaagggagg

SEQ ID NO: 9957 - DNA, 20 bp, Artificial Sequence
  Description of Artificial Sequence: Synthetic oligonucleotide
  Target: APOC3; (+) strand; PAM type: NRG; PAM sequence: CGG
cgcacgtgaagggaggaggc

SEQ ID NO: 9958 - DNA, 20 bp, Artificial Sequence
  Description of Artificial Sequence: Synthetic oligonucleotide
  Target: APOC3; (+) strand; PAM type: NRG; PAM sequence: TGG
cgtgaagggaggaggccgga

SEQ ID NO: 9959 - DNA, 20 bp, Artificial Sequence
  Description of Artificial Sequence: Synthetic oligonucleotide
  Target: APOC3; (+) strand; PAM type: NRG; PAM sequence: GGG
gtgaagggaggaggccggat

SEQ ID NO: 9960 - DNA, 20 bp, Artificial Sequence
  Description of Artificial Sequence: Synthetic oligonucleotide
  Target: APOC3; (+) strand; PAM type: NRG; PAM sequence: TAG
agggaggaggccggatgggc

SEQ ID NO: 9961 - DNA, 20 bp, Artificial Sequence
  Description of Artificial Sequence: Synthetic oligonucleotide
  Target: APOC3; (+) strand; PAM type: NRG; PAM sequence: GAG
ggaggaggccggatgggcta

SEQ ID NO: 9962 - DNA, 20 bp, Artificial Sequence
  Description of Artificial Sequence: Synthetic oligonucleotide
  Target: APOC3; (+) strand; PAM type: NRG; PAM sequence: AGG
gaggaggccggatgggctag

SEQ ID NO: 9963 - DNA, 20 bp, Artificial Sequence
  Description of Artificial Sequence: Synthetic oligonucleotide
  Target: APOC3; (+) strand; PAM type: NRG; PAM sequence: TGG
aggccggatgggctagaggt

SEQ ID NO: 9964 - DNA, 20 bp, Artificial Sequence
  Description of Artificial Sequence: Synthetic oligonucleotide
  Target: APOC3; (+) strand; PAM type: NRG; PAM sequence: GAG
gccggatgggctagaggttg

SEQ ID NO: 9965 - DNA, 20 bp, Artificial Sequence
  Description of Artificial Sequence: Synthetic oligonucleotide
  Target: APOC3; (+) strand; PAM type: NRG; PAM sequence: AAG
gatgggctagaggttggagt

SEQ ID NO: 9966 - DNA, 20 bp, Artificial Sequence
  Description of Artificial Sequence: Synthetic oligonucleotide
  Target: APOC3; (+) strand; PAM type: NRG; PAM sequence: GAG
aggttggagtaagatgcaac

SEQ ID NO: 9967 - DNA, 20 bp, Artificial Sequence
  Description of Artificial Sequence: Synthetic oligonucleotide
  Target: APOC3; (+) strand; PAM type: NRG; PAM sequence: AGG
ggttggagtaagatgcaacg

SEQ ID NO: 9968 - DNA, 20 bp, Artificial Sequence
  Description of Artificial Sequence: Synthetic oligonucleotide
  Target: APOC3; (+) strand; PAM type: NRG; PAM sequence: TGG
atgcaacgaggcactattct

SEQ ID NO: 9969 - DNA, 20 bp, Artificial Sequence
  Description of Artificial Sequence: Synthetic oligonucleotide
  Target: APOC3; (+) strand; PAM type: NRG; PAM sequence: CAG
ttggctccaccacttgatat

SEQ ID NO: 9970 - DNA, 20 bp, Artificial Sequence
  Description of Artificial Sequence: Synthetic oligonucleotide
  Target: APOC3; (+) strand; PAM type: NRG; PAM sequence: CAG
ccaccacttgatatcagcct

SEQ ID NO: 9971 - DNA, 20 bp, Artificial Sequence
  Description of Artificial Sequence: Synthetic oligonucleotide
  Target: APOC3; (+) strand; PAM type: NRG; PAM sequence: AAG
gcctcagtttcttacatgta

SEQ ID NO: 9972 - DNA, 20 bp, Artificial Sequence
  Description of Artificial Sequence: Synthetic oligonucleotide
  Target: APOC3; (+) strand; PAM type: NRG; PAM sequence: TGG
tcagtttcttacatgtaaag

SEQ ID NO: 9973 - DNA, 20 bp, Artificial Sequence
  Description of Artificial Sequence: Synthetic oligonucleotide
  Target: APOC3; (+) strand; PAM type: NRG; PAM sequence: TAG
caaccgtaccccctccaccg

SEQ ID NO: 9974 - DNA, 20 bp, Artificial Sequence
  Description of Artificial Sequence: Synthetic oligonucleotide
  Target: APOC3; (+) strand; PAM type: NRG; PAM sequence: AGG
aaccgtaccccctccaccgt

SEQ ID NO: 9975 - DNA, 20 bp, Artificial Sequence
  Description of Artificial Sequence: Synthetic oligonucleotide
  Target: APOC3; (+) strand; PAM type: NRG; PAM sequence: GAG
ctccaccgtaggtttgccgt

SEQ ID NO: 9976 - DNA, 20 bp, Artificial Sequence
  Description of Artificial Sequence: Synthetic oligonucleotide
  Target: APOC3; (+) strand; PAM type: NRG; PAM sequence: GAG
gtttgccgtgagattgaaat

SEQ ID NO: 9977 - DNA, 20 bp, Artificial Sequence
  Description of Artificial Sequence: Synthetic oligonucleotide
  Target: APOC3; (+) strand; PAM type: NRG; PAM sequence: GAG
ttgccgtgagattgaaatga

SEQ ID NO: 9978 - DNA, 20 bp, Artificial Sequence
  Description of Artificial Sequence: Synthetic oligonucleotide
  Target: APOC3; (+) strand; PAM type: NRG; PAM sequence: GAG
gccgtgagattgaaatgaga

SEQ ID NO: 9979 - DNA, 20 bp, Artificial Sequence
  Description of Artificial Sequence: Synthetic oligonucleotide
  Target: APOC3; (+) strand; PAM type: NRG; PAM sequence: TGG
gagagagcgttcgaaccgtt

SEQ ID NO: 9980 - DNA, 20 bp, Artificial Sequence
  Description of Artificial Sequence: Synthetic oligonucleotide
  Target: APOC3; (+) strand; PAM type: NRG; PAM sequence: CAG
agcgttcgaaccgtttggca

SEQ ID NO: 9981 - DNA, 20 bp, Artificial Sequence
  Description of Artificial Sequence: Synthetic oligonucleotide
  Target: APOC3; (+) strand; PAM type: NRG; PAM sequence: AAG
tggcacagcacctgcacgta

SEQ ID NO: 9982 - DNA, 20 bp, Artificial Sequence
  Description of Artificial Sequence: Synthetic oligonucleotide
  Target: APOC3; (+) strand; PAM type: NRG; PAM sequence: CAG
gatcaatgttgtcatgatta

SEQ ID NO: 9983 - DNA, 20 bp, Artificial Sequence
  Description of Artificial Sequence: Synthetic oligonucleotide
  Target: APOC3; (+) strand; PAM type: NRG; PAM sequence: GAG
atgttgtcatgattacagtt

SEQ ID NO: 9984 - DNA, 20 bp, Artificial Sequence
  Description of Artificial Sequence: Synthetic oligonucleotide
  Target: APOC3; (+) strand; PAM type: NRG; PAM sequence: TGG
atgattacagttgagctgac

SEQ ID NO: 9985 - DNA, 20 bp, Artificial Sequence
  Description of Artificial Sequence: Synthetic oligonucleotide
  Target: APOC3; (+) strand; PAM type: NRG; PAM sequence: GGG
tgattacagttgagctgact

SEQ ID NO: 9986 - DNA, 20 bp, Artificial Sequence
  Description of Artificial Sequence: Synthetic oligonucleotide
  Target: APOC3; (+) strand; PAM type: NRG; PAM sequence: TGG
agttgagctgactgggccct

SEQ ID NO: 9987 - DNA, 20 bp, Artificial Sequence
  Description of Artificial Sequence: Synthetic oligonucleotide
  Target: APOC3; (+) strand; PAM type: NRG; PAM sequence: GGG
gttgagctgactgggccctt

SEQ ID NO: 9988 - DNA, 20 bp, Artificial Sequence
  Description of Artificial Sequence: Synthetic oligonucleotide
  Target: APOC3; (+) strand; PAM type: NRG; PAM sequence: CGG
ctgactgggcccttgggacc

SEQ ID NO: 9989 - DNA, 20 bp, Artificial Sequence
  Description of Artificial Sequence: Synthetic oligonucleotide
  Target: APOC3; (+) strand; PAM type: NRG; PAM sequence: TGG
tgggcccttgggacccggac

SEQ ID NO: 9990 - DNA, 20 bp, Artificial Sequence
  Description of Artificial Sequence: Synthetic oligonucleotide
  Target: APOC3; (+) strand; PAM type: NRG; PAM sequence: GAG
ggcccttgggacccggactg

SEQ ID NO: 9991 - DNA, 20 bp, Artificial Sequence
  Description of Artificial Sequence: Synthetic oligonucleotide
  Target: APOC3; (+) strand; PAM type: NRG; PAM sequence: TGG
ccttgggacccggactggag

SEQ ID NO: 9992 - DNA, 20 bp, Artificial Sequence
  Description of Artificial Sequence: Synthetic oligonucleotide
  Target: APOC3; (+) strand; PAM type: NRG; PAM sequence: TGG
tgggacccggactggagtgg

SEQ ID NO: 9993 - DNA, 20 bp, Artificial Sequence
  Description of Artificial Sequence: Synthetic oligonucleotide
  Target: APOC3; (+) strand; PAM type: NRG; PAM sequence: GGG
gggacccggactggagtggt

SEQ ID NO: 9994 - DNA, 20 bp, Artificial Sequence
  Description of Artificial Sequence: Synthetic oligonucleotide
  Target: APOC3; (+) strand; PAM type: NRG; PAM sequence: GGG
ggacccggactggagtggtg

SEQ ID NO: 9995 - DNA, 20 bp, Artificial Sequence
  Description of Artificial Sequence: Synthetic oligonucleotide
  Target: APOC3; (+) strand; PAM type: NRG; PAM sequence: GGG
gacccggactggagtggtgg

SEQ ID NO: 9996 - DNA, 20 bp, Artificial Sequence
  Description of Artificial Sequence: Synthetic oligonucleotide
  Target: APOC3; (+) strand; PAM type: NRG; PAM sequence: GGG
acccggactggagtggtggg

SEQ ID NO: 9997 - DNA, 20 bp, Artificial Sequence
  Description of Artificial Sequence: Synthetic oligonucleotide
  Target: APOC3; (+) strand; PAM type: NRG; PAM sequence: CAG
cggactggagtggtgggggg

SEQ ID NO: 9998 - DNA, 20 bp, Artificial Sequence
  Description of Artificial Sequence: Synthetic oligonucleotide
  Target: APOC3; (+) strand; PAM type: NRG; PAM sequence: TGG
agtggtggggggcagtgtcc

SEQ ID NO: 9999 - DNA, 20 bp, Artificial Sequence
  Description of Artificial Sequence: Synthetic oligonucleotide
  Target: APOC3; (+) strand; PAM type: NRG; PAM sequence: GGG
gtggtggggggcagtgtcct

SEQ ID NO: 10000 - DNA, 20 bp, Artificial Sequence
  Description of Artificial Sequence: Synthetic oligonucleotide
  Target: APOC3; (+) strand; PAM type: NRG; PAM sequence: AAG
ggcagtgtcctgggaccaaa

SEQ ID NO: 10001 - DNA, 20 bp, Artificial Sequence
  Description of Artificial Sequence: Synthetic oligonucleotide
  Target: APOC3; (+) strand; PAM type: NRG; PAM sequence: AAG
agtgtcctgggaccaaaaag

SEQ ID NO: 10002 - DNA, 20 bp, Artificial Sequence
  Description of Artificial Sequence: Synthetic oligonucleotide
  Target: APOC3; (+) strand; PAM type: NRG; PAM sequence: AAG
ctgggaccaaaaagaagcac

SEQ ID NO: 10003 - DNA, 20 bp, Artificial Sequence
  Description of Artificial Sequence: Synthetic oligonucleotide
  Target: APOC3; (+) strand; PAM type: NRG; PAM sequence: AGG
tgggaccaaaaagaagcaca

SEQ ID NO: 10004 - DNA, 20 bp, Artificial Sequence
  Description of Artificial Sequence: Synthetic oligonucleotide
  Target: APOC3; (+) strand; PAM type: NRG; PAM sequence: TAG
agaagcacaaggtctcccaa

SEQ ID NO: 10005 - DNA, 20 bp, Artificial Sequence
  Description of Artificial Sequence: Synthetic oligonucleotide
  Target: APOC3; (+) strand; PAM type: NRG; PAM sequence: GAG
aagcacaaggtctcccaata

SEQ ID NO: 10006 - DNA, 20 bp, Artificial Sequence
  Description of Artificial Sequence: Synthetic oligonucleotide
  Target: APOC3; (+) strand; PAM type: NRG; PAM sequence: AGG
agcacaaggtctcccaatag

SEQ ID NO: 10007 - DNA, 20 bp, Artificial Sequence
  Description of Artificial Sequence: Synthetic oligonucleotide
  Target: APOC3; (+) strand; PAM type: NRG; PAM sequence: AAG
tttgtgtccccaccacccga

SEQ ID NO: 10008 - DNA, 20 bp, Artificial Sequence
  Description of Artificial Sequence: Synthetic oligonucleotide
  Target: APOC3; (+) strand; PAM type: NRG; PAM sequence: CAG
ccccaccacccgaaagatgt

SEQ ID NO: 10009 - DNA, 20 bp, Artificial Sequence
  Description of Artificial Sequence: Synthetic oligonucleotide
  Target: APOC3; (+) strand; PAM type: NRG; PAM sequence: AGG
cccaccacccgaaagatgtc

SEQ ID NO: 10010 - DNA, 20 bp, Artificial Sequence
  Description of Artificial Sequence: Synthetic oligonucleotide
  Target: APOC3; (+) strand; PAM type: NRG; PAM sequence: CAG
ccacccgaaagatgtcaggt

SEQ ID NO: 10011 - DNA, 20 bp, Artificial Sequence
  Description of Artificial Sequence: Synthetic oligonucleotide
  Target: APOC3; (+) strand; PAM type: NRG; PAM sequence: GAG
acccgaaagatgtcaggtca

SEQ ID NO: 10012 - DNA, 20 bp, Artificial Sequence
  Description of Artificial Sequence: Synthetic oligonucleotide
  Target: APOC3; (+) strand; PAM type: NRG; PAM sequence: GAG
ccgaaagatgtcaggtcaga

SEQ ID NO: 10013 - DNA, 20 bp, Artificial Sequence
  Description of Artificial Sequence: Synthetic oligonucleotide
  Target: APOC3; (+) strand; PAM type: NRG; PAM sequence: GAG
gatgtcaggtcagagagccc

SEQ ID NO: 10014 - DNA, 20 bp, Artificial Sequence
  Description of Artificial Sequence: Synthetic oligonucleotide
  Target: APOC3; (+) strand; PAM type: NRG; PAM sequence: GAG
tgtcaggtcagagagcccga

SEQ ID NO: 10015 - DNA, 20 bp, Artificial Sequence
  Description of Artificial Sequence: Synthetic oligonucleotide
  Target: APOC3; (+) strand; PAM type: NRG; PAM sequence: CAG
gtcagagagcccgagagctg

SEQ ID NO: 10016 - DNA, 20 bp, Artificial Sequence
  Description of Artificial Sequence: Synthetic oligonucleotide
  Target: APOC3; (+) strand; PAM type: NRG; PAM sequence: TGG
gagagcccgagagctgcaga

SEQ ID NO: 10017 - DNA, 20 bp, Artificial Sequence
  Description of Artificial Sequence: Synthetic oligonucleotide
  Target: APOC3; (+) strand; PAM type: NRG; PAM sequence: GAG
ccgagagctgcagatggctt

SEQ ID NO: 10018 - DNA, 20 bp, Artificial Sequence
  Description of Artificial Sequence: Synthetic oligonucleotide
  Target: APOC3; (+) strand; PAM type: NRG; PAM sequence: TAG
agagctgcagatggcttgag

SEQ ID NO: 10019 - DNA, 20 bp, Artificial Sequence
  Description of Artificial Sequence: Synthetic oligonucleotide
  Target: APOC3; (+) strand; PAM type: NRG; PAM sequence: AGG
gagctgcagatggcttgagt

SEQ ID NO: 10020 - DNA, 20 bp, Artificial Sequence
  Description of Artificial Sequence: Synthetic oligonucleotide
  Target: APOC3; (+) strand; PAM type: NRG; PAM sequence: GGG
agctgcagatggcttgagta

SEQ ID NO: 10021 - DNA, 20 bp, Artificial Sequence
  Description of Artificial Sequence: Synthetic oligonucleotide
  Target: APOC3; (+) strand; PAM type: NRG; PAM sequence: CAG
ttgagtagggctccactctt

SEQ ID NO: 10022 - DNA, 20 bp, Artificial Sequence
  Description of Artificial Sequence: Synthetic oligonucleotide
  Target: APOC3; (+) strand; PAM type: NRG; PAM sequence: TGG
ctcttcagatcaaaaaactg

SEQ ID NO: 10023 - DNA, 20 bp, Artificial Sequence
  Description of Artificial Sequence: Synthetic oligonucleotide
  Target: APOC3; (+) strand; PAM type: NRG; PAM sequence: CGG
cagatcaaaaaactgtggcc

SEQ ID NO: 10024 - DNA, 20 bp, Artificial Sequence
  Description of Artificial Sequence: Synthetic oligonucleotide
  Target: APOC3; (+) strand; PAM type: NRG; PAM sequence: GAG
gatcaaaaaactgtggcccg

SEQ ID NO: 10025 - DNA, 20 bp, Artificial Sequence
  Description of Artificial Sequence: Synthetic oligonucleotide
  Target: APOC3; (+) strand; PAM type: NRG; PAM sequence: GAG
tcaaaaaactgtggcccgga

SEQ ID NO: 10026 - DNA, 20 bp, Artificial Sequence
  Description of Artificial Sequence: Synthetic oligonucleotide
  Target: APOC3; (+) strand; PAM type: NRG; PAM sequence: AGG
caaaaaactgtggcccggag

SEQ ID NO: 10027 - DNA, 20 bp, Artificial Sequence
  Description of Artificial Sequence: Synthetic oligonucleotide
  Target: APOC3; (+) strand; PAM type: NRG; PAM sequence: AAG
aactgtggcccggagaggcg

SEQ ID NO: 10028 - DNA, 20 bp, Artificial Sequence
  Description of Artificial Sequence: Synthetic oligonucleotide
  Target: APOC3; (+) strand; PAM type: NRG; PAM sequence: AGG
actgtggcccggagaggcga

SEQ ID NO: 10029 - DNA, 20 bp, Artificial Sequence
  Description of Artificial Sequence: Synthetic oligonucleotide
  Target: APOC3; (+) strand; PAM type: NRG; PAM sequence: TGG
cccggagaggcgaaggcact

SEQ ID NO: 10030 - DNA, 20 bp, Artificial Sequence
  Description of Artificial Sequence: Synthetic oligonucleotide
  Target: APOC3; (+) strand; PAM type: NRG; PAM sequence: CAG
gagaggcgaaggcacttggc

SEQ ID NO: 10031 - DNA, 20 bp, Artificial Sequence
  Description of Artificial Sequence: Synthetic oligonucleotide
  Target: APOC3; (+) strand; PAM type: NRG; PAM sequence: CAG
aaggcacttggccagcatca

SEQ ID NO: 10032 - DNA, 20 bp, Artificial Sequence
  Description of Artificial Sequence: Synthetic oligonucleotide
  Target: APOC3; (+) strand; PAM type: NRG; PAM sequence: GAG
ggcacttggccagcatcaca

SEQ ID NO: 10033 - DNA, 20 bp, Artificial Sequence
  Description of Artificial Sequence: Synthetic oligonucleotide
  Target: APOC3; (+) strand; PAM type: NRG; PAM sequence: CAG
cttggccagcatcacagagc

SEQ ID NO: 10034 - DNA, 20 bp, Artificial Sequence
  Description of Artificial Sequence: Synthetic oligonucleotide
  Target: APOC3; (+) strand; PAM type: NRG; PAM sequence: TGG
agcatcacagagccagcacg

SEQ ID NO: 10035 - DNA, 20 bp, Artificial Sequence
  Description of Artificial Sequence: Synthetic oligonucleotide
  Target: APOC3; (+) strand; PAM type: NRG; PAM sequence: CAG
atcacagagccagcacgtgg

SEQ ID NO: 10036 - DNA, 20 bp, Artificial Sequence
  Description of Artificial Sequence: Synthetic oligonucleotide
  Target: APOC3; (+) strand; PAM type: NRG; PAM sequence: AGG
tcacagagccagcacgtggc

SEQ ID NO: 10037 - DNA, 20 bp, Artificial Sequence
  Description of Artificial Sequence: Synthetic oligonucleotide
  Target: APOC3; (+) strand; PAM type: NRG; PAM sequence: GGG
cacagagccagcacgtggca

SEQ ID NO: 10038 - DNA, 20 bp, Artificial Sequence
  Description of Artificial Sequence: Synthetic oligonucleotide
  Target: APOC3; (+) strand; PAM type: NRG; PAM sequence: CAG
gagccagcacgtggcagggc

SEQ ID NO: 10039 - DNA, 20 bp, Artificial Sequence
  Description of Artificial Sequence: Synthetic oligonucleotide
  Target: APOC3; (+) strand; PAM type: NRG; PAM sequence: GAG
acgtggcagggccagacctt

SEQ ID NO: 10040 - DNA, 20 bp, Artificial Sequence
  Description of Artificial Sequence: Synthetic oligonucleotide
  Target: APOC3; (+) strand; PAM type: NRG; PAM sequence: CAG
gcagggccagaccttgagcc

SEQ ID NO: 10041 - DNA, 20 bp, Artificial Sequence
  Description of Artificial Sequence: Synthetic oligonucleotide
  Target: APOC3; (+) strand; PAM type: NRG; PAM sequence: AGG
cagggccagaccttgagccc

SEQ ID NO: 10042 - DNA, 20 bp, Artificial Sequence
  Description of Artificial Sequence: Synthetic oligonucleotide
  Target: APOC3; (+) strand; PAM type: NRG; PAM sequence: CAG
gccagaccttgagcccaggt

SEQ ID NO: 10043 - DNA, 20 bp, Artificial Sequence
  Description of Artificial Sequence: Synthetic oligonucleotide
  Target: APOC3; (+) strand; PAM type: NRG; PAM sequence: CAG
tcagctgcgtgtattctgct

SEQ ID NO: 10044 - DNA, 20 bp, Artificial Sequence
  Description of Artificial Sequence: Synthetic oligonucleotide
  Target: APOC3; (+) strand; PAM type: NRG; PAM sequence: TGG
ctgcgtgtattctgctcagt

SEQ ID NO: 10045 - DNA, 20 bp, Artificial Sequence
  Description of Artificial Sequence: Synthetic oligonucleotide
  Target: APOC3; (+) strand; PAM type: NRG; PAM sequence: CAG
tgtattctgctcagttggtg

SEQ ID NO: 10046 - DNA, 20 bp, Artificial Sequence
  Description of Artificial Sequence: Synthetic oligonucleotide
  Target: APOC3; (+) strand; PAM type: NRG; PAM sequence: CAG
tgctcagttggtgcagaaaa

SEQ ID NO: 10047 - DNA, 20 bp, Artificial Sequence
  Description of Artificial Sequence: Synthetic oligonucleotide
  Target: APOC3; (+) strand; PAM type: NRG; PAM sequence: CAG
cagttttgtcactcctatgt

SEQ ID NO: 10048 - DNA, 20 bp, Artificial Sequence
  Description of Artificial Sequence: Synthetic oligonucleotide
  Target: APOC3; (+) strand; PAM type: NRG; PAM sequence: AGG
agttttgtcactcctatgtc

SEQ ID NO: 10049 - DNA, 20 bp, Artificial Sequence
  Description of Artificial Sequence: Synthetic oligonucleotide
  Target: APOC3; (+) strand; PAM type: NRG; PAM sequence: TAG
gtcactcctatgtcaggtgt

SEQ ID NO: 10050 - DNA, 20 bp, Artificial Sequence
  Description of Artificial Sequence: Synthetic oligonucleotide
  Target: APOC3; (+) strand; PAM type: NRG; PAM sequence: AGG
tcactcctatgtcaggtgtt

SEQ ID NO: 10051 - DNA, 20 bp, Artificial Sequence
  Description of Artificial Sequence: Synthetic oligonucleotide
  Target: APOC3; (+) strand; PAM type: NRG; PAM sequence: GGG
cactcctatgtcaggtgtta

SEQ ID NO: 10052 - DNA, 20 bp, Artificial Sequence
  Description of Artificial Sequence: Synthetic oligonucleotide
  Target: APOC3; (+) strand; PAM type: NRG; PAM sequence: CAG
aggtgttagggactccttta

SEQ ID NO: 10053 - DNA, 20 bp, Artificial Sequence
  Description of Artificial Sequence: Synthetic oligonucleotide
  Target: APOC3; (+) strand; PAM type: NRG; PAM sequence: CAG
agggactcctttacagatct

SEQ ID NO: 10054 - DNA, 20 bp, Artificial Sequence
  Description of Artificial Sequence: Synthetic oligonucleotide
  Target: APOC3; (+) strand; PAM type: NRG; PAM sequence: TGG
gactcctttacagatctcag

SEQ ID NO: 10055 - DNA, 20 bp, Artificial Sequence
  Description of Artificial Sequence: Synthetic oligonucleotide
  Target: APOC3; (+) strand; PAM type: NRG; PAM sequence: CAG
tttacagatctcagtggcat

SEQ ID NO: 10056 - DNA, 20 bp, Artificial Sequence
  Description of Artificial Sequence: Synthetic oligonucleotide
  Target: APOC3; (+) strand; PAM type: NRG; PAM sequence: CAG
ctcagtggcatcagtacatc

SEQ ID NO: 10057 - DNA, 20 bp, Artificial Sequence
  Description of Artificial Sequence: Synthetic oligonucleotide
  Target: APOC3; (+) strand; PAM type: NRG; PAM sequence: TGG
tcagtacatccagccccacc

SEQ ID NO: 10058 - DNA, 20 bp, Artificial Sequence
  Description of Artificial Sequence: Synthetic oligonucleotide
  Target: APOC3; (+) strand; PAM type: NRG; PAM sequence: GAG
agtacatccagccccacctg

SEQ ID NO: 10059 - DNA, 20 bp, Artificial Sequence
  Description of Artificial Sequence: Synthetic oligonucleotide
  Target: APOC3; (+) strand; PAM type: NRG; PAM sequence: CAG
ctttctctctgaaaattccc

SEQ ID NO: 10060 - DNA, 20 bp, Artificial Sequence
  Description of Artificial Sequence: Synthetic oligonucleotide
  Target: APOC3; (+) strand; PAM type: NRG; PAM sequence: AGG
tttctctctgaaaattcccc

SEQ ID NO: 10061 - DNA, 20 bp, Artificial Sequence
  Description of Artificial Sequence: Synthetic oligonucleotide
  Target: APOC3; (+) strand; PAM type: NRG; PAM sequence: GGG
ttctctctgaaaattcccca

SEQ ID NO: 10062 - DNA, 20 bp, Artificial Sequence
  Description of Artificial Sequence: Synthetic oligonucleotide
  Target: APOC3; (+) strand; PAM type: NRG; PAM sequence: TGG
aattccccagggcttctctc

SEQ ID NO: 10063 - DNA, 20 bp, Artificial Sequence
  Description of Artificial Sequence: Synthetic oligonucleotide
  Target: APOC3; (+) strand; PAM type: NRG; PAM sequence: GGG
attccccagggcttctctct

SEQ ID NO: 10064 - DNA, 20 bp, Artificial Sequence
  Description of Artificial Sequence: Synthetic oligonucleotide
  Target: APOC3; (+) strand; PAM type: NRG; PAM sequence: GAG
ccagggcttctctctgggct

SEQ ID NO: 10065 - DNA, 20 bp, Artificial Sequence
  Description of Artificial Sequence: Synthetic oligonucleotide
  Target: APOC3; (+) strand; PAM type: NRG; PAM sequence: GAG
agggcttctctctgggctga

SEQ ID NO: 10066 - DNA, 20 bp, Artificial Sequence
  Description of Artificial Sequence: Synthetic oligonucleotide
  Target: APOC3; (+) strand; PAM type: NRG; PAM sequence: CAG
ctctctgggctgagagatct

SEQ ID NO: 10067 - DNA, 20 bp, Artificial Sequence
  Description of Artificial Sequence: Synthetic oligonucleotide
  Target: APOC3; (+) strand; PAM type: NRG; PAM sequence: TAG
gagatctcagcacccgtatc

SEQ ID NO: 10068 - DNA, 20 bp, Artificial Sequence
  Description of Artificial Sequence: Synthetic oligonucleotide
  Target: APOC3; (+) strand; PAM type: NRG; PAM sequence: CAG
atctagaaaatgttcccacc

SEQ ID NO: 10069 - DNA, 20 bp, Artificial Sequence
  Description of Artificial Sequence: Synthetic oligonucleotide
  Target: APOC3; (+) strand; PAM type: NRG; PAM sequence: TGG
aaaatgttcccacccagacc

SEQ ID NO: 10070 - DNA, 20 bp, Artificial Sequence
  Description of Artificial Sequence: Synthetic oligonucleotide
  Target: APOC3; (+) strand; PAM type: NRG; PAM sequence: TGG
tgttcccacccagacctggc

SEQ ID NO: 10071 - DNA, 20 bp, Artificial Sequence
  Description of Artificial Sequence: Synthetic oligonucleotide
  Target: APOC3; (+) strand; PAM type: NRG; PAM sequence: TAG
tggctggatgactgctgttg

SEQ ID NO: 10072 - DNA, 20 bp, Artificial Sequence
  Description of Artificial Sequence: Synthetic oligonucleotide
  Target: APOC3; (+) strand; PAM type: NRG; PAM sequence: TGG
gatgactgctgttgtagctc

SEQ ID NO: 10073 - DNA, 20 bp, Artificial Sequence
  Description of Artificial Sequence: Synthetic oligonucleotide
  Target: APOC3; (+) strand; PAM type: NRG; PAM sequence: AAG
gactgctgttgtagctctgg

SEQ ID NO: 10074 - DNA, 20 bp, Artificial Sequence
  Description of Artificial Sequence: Synthetic oligonucleotide
  Target: APOC3; (+) strand; PAM type: NRG; PAM sequence: AGG
actgctgttgtagctctgga

SEQ ID NO: 10075 - DNA, 20 bp, Artificial Sequence
  Description of Artificial Sequence: Synthetic oligonucleotide
  Target: APOC3; (+) strand; PAM type: NRG; PAM sequence: TAG
ctgttgtagctctggaaggt

SEQ ID NO: 10076 - DNA, 20 bp, Artificial Sequence
  Description of Artificial Sequence: Synthetic oligonucleotide
  Target: APOC3; (+) strand; PAM type: NRG; PAM sequence: AGG
tgttgtagctctggaaggtt

SEQ ID NO: 10077 - DNA, 20 bp, Artificial Sequence
  Description of Artificial Sequence: Synthetic oligonucleotide
  Target: APOC3; (+) strand; PAM type: NRG; PAM sequence: AAG
ctggaaggttaggaactaaa

SEQ ID NO: 10078 - DNA, 20 bp, Artificial Sequence
  Description of Artificial Sequence: Synthetic oligonucleotide
  Target: APOC3; (+) strand; PAM type: NRG; PAM sequence: TAG
aaaaagcccactcctttacc

SEQ ID NO: 10079 - DNA, 20 bp, Artificial Sequence
  Description of Artificial Sequence: Synthetic oligonucleotide
  Target: APOC3; (+) strand; PAM type: NRG; PAM sequence: AGG
aaaagcccactcctttacct

SEQ ID NO: 10080 - DNA, 20 bp, Artificial Sequence
  Description of Artificial Sequence: Synthetic oligonucleotide
  Target: APOC3; (+) strand; PAM type: NRG; PAM sequence: GGG
aaagcccactcctttaccta

SEQ ID NO: 10081 - DNA, 20 bp, Artificial Sequence
  Description of Artificial Sequence: Synthetic oligonucleotide
  Target: APOC3; (+) strand; PAM type: NRG; PAM sequence: TAG
gcccactcctttacctaggg

SEQ ID NO: 10082 - DNA, 20 bp, Artificial Sequence
  Description of Artificial Sequence: Synthetic oligonucleotide
  Target: APOC3; (+) strand; PAM type: NRG; PAM sequence: AAG
ctcctttacctagggtagct

SEQ ID NO: 10083 - DNA, 20 bp, Artificial Sequence
  Description of Artificial Sequence: Synthetic oligonucleotide
  Target: APOC3; (+) strand; PAM type: NRG; PAM sequence: TGG
ctagggtagctaagatacac

SEQ ID NO: 10084 - DNA, 20 bp, Artificial Sequence
  Description of Artificial Sequence: Synthetic oligonucleotide
  Target: APOC3; (+) strand; PAM type: NRG; PAM sequence: GAG
agggtagctaagatacactg

SEQ ID NO: 10085 - DNA, 20 bp, Artificial Sequence
  Description of Artificial Sequence: Synthetic oligonucleotide
  Target: APOC3; (+) strand; PAM type: NRG; PAM sequence: TGG
tagctaagatacactggaga

SEQ ID NO: 10086 - DNA, 20 bp, Artificial Sequence
  Description of Artificial Sequence: Synthetic oligonucleotide
  Target: APOC3; (+) strand; PAM type: NRG; PAM sequence: GGG
agctaagatacactggagat

SEQ ID NO: 10087 - DNA, 20 bp, Artificial Sequence
  Description of Artificial Sequence: Synthetic oligonucleotide
  Target: APOC3; (+) strand; PAM type: NRG; PAM sequence: GGG
gctaagatacactggagatg

SEQ ID NO: 10088 - DNA, 20 bp, Artificial Sequence
  Description of Artificial Sequence: Synthetic oligonucleotide
  Target: APOC3; (+) strand; PAM type: NRG; PAM sequence: TGG
atacactggagatggggaca

SEQ ID NO: 10089 - DNA, 20 bp, Artificial Sequence
  Description of Artificial Sequence: Synthetic oligonucleotide
  Target: APOC3; (+) strand; PAM type: NRG; PAM sequence: GGG
tacactggagatggggacat

SEQ ID NO: 10090 - DNA, 20 bp, Artificial Sequence
  Description of Artificial Sequence: Synthetic oligonucleotide
  Target: APOC3; (+) strand; PAM type: NRG; PAM sequence: GGG
acactggagatggggacatg

SEQ ID NO: 10091 - DNA, 20 bp, Artificial Sequence
  Description of Artificial Sequence: Synthetic oligonucleotide
  Target: APOC3; (+) strand; PAM type: NRG; PAM sequence: TGG
tggagatggggacatgggga

SEQ ID NO: 10092 - DNA, 20 bp, Artificial Sequence
  Description of Artificial Sequence: Synthetic oligonucleotide
  Target: APOC3; (+) strand; PAM type: NRG; PAM sequence: GGG
ggagatggggacatggggat

SEQ ID NO: 10093 - DNA, 20 bp, Artificial Sequence
  Description of Artificial Sequence: Synthetic oligonucleotide
  Target: APOC3; (+) strand; PAM type: NRG; PAM sequence: GGG
gagatggggacatggggatg

SEQ ID NO: 10094 - DNA, 20 bp, Artificial Sequence
  Description of Artificial Sequence: Synthetic oligonucleotide
  Target: APOC3; (+) strand; PAM type: NRG; PAM sequence: CAG
tggggatggggccgattatc

SEQ ID NO: 10095 - DNA, 20 bp, Artificial Sequence
  Description of Artificial Sequence: Synthetic oligonucleotide
  Target: APOC3; (+) strand; PAM type: NRG; PAM sequence: AGG
ggggatggggccgattatcc

SEQ ID NO: 10096 - DNA, 20 bp, Artificial Sequence
  Description of Artificial Sequence: Synthetic oligonucleotide
  Target: APOC3; (+) strand; PAM type: NRG; PAM sequence: GGG
gggatggggccgattatcca

SEQ ID NO: 10097 - DNA, 20 bp, Artificial Sequence
  Description of Artificial Sequence: Synthetic oligonucleotide
  Target: APOC3; (+) strand; PAM type: NRG; PAM sequence: GGG
ggatggggccgattatccag

SEQ ID NO: 10098 - DNA, 20 bp, Artificial Sequence
  Description of Artificial Sequence: Synthetic oligonucleotide
  Target: APOC3; (+) strand; PAM type: NRG; PAM sequence: GAG
gattatccaggggcctgcat

SEQ ID NO: 10099 - DNA, 20 bp, Artificial Sequence
  Description of Artificial Sequence: Synthetic oligonucleotide
  Target: APOC3; (+) strand; PAM type: NRG; PAM sequence: AGG
attatccaggggcctgcatg

SEQ ID NO: 10100 - DNA, 20 bp, Artificial Sequence
  Description of Artificial Sequence: Synthetic oligonucleotide
  Target: APOC3; (+) strand; PAM type: NRG; PAM sequence: GGG
ttatccaggggcctgcatga

SEQ ID NO: 10101 - DNA, 20 bp, Artificial Sequence
  Description of Artificial Sequence: Synthetic oligonucleotide
  Target: APOC3; (+) strand; PAM type: NRG; PAM sequence: GGG
tatccaggggcctgcatgag

SEQ ID NO: 10102 - DNA, 20 bp, Artificial Sequence
  Description of Artificial Sequence: Synthetic oligonucleotide
  Target: APOC3; (+) strand; PAM type: NRG; PAM sequence: GGG
atccaggggcctgcatgagg

SEQ ID NO: 10103 - DNA, 20 bp, Artificial Sequence
  Description of Artificial Sequence: Synthetic oligonucleotide
  Target: APOC3; (+) strand; PAM type: NRG; PAM sequence: AAG
gggcctgcatgagggggcaa

SEQ ID NO: 10104 - DNA, 20 bp, Artificial Sequence
  Description of Artificial Sequence: Synthetic oligonucleotide
  Target: APOC3; (+) strand; PAM type: NRG; PAM sequence: AGG
ggcctgcatgagggggcaaa

SEQ ID NO: 10105 - DNA, 20 bp, Artificial Sequence
  Description of Artificial Sequence: Synthetic oligonucleotide
  Target: APOC3; (+) strand; PAM type: NRG; PAM sequence: CAG
tgagggggcaaaaggccctg

SEQ ID NO: 10106 - DNA, 20 bp, Artificial Sequence
  Description of Artificial Sequence: Synthetic oligonucleotide
  Target: APOC3; (+) strand; PAM type: NRG; PAM sequence: GAG
agggggcaaaaggccctgca

SEQ ID NO: 10107 - DNA, 20 bp, Artificial Sequence
  Description of Artificial Sequence: Synthetic oligonucleotide
  Target: APOC3; (+) strand; PAM type: NRG; PAM sequence: GAG
ggggcaaaaggccctgcaga

SEQ ID NO: 10108 - DNA, 20 bp, Artificial Sequence
  Description of Artificial Sequence: Synthetic oligonucleotide
  Target: APOC3; (+) strand; PAM type: NRG; PAM sequence: GAG
ggcaaaaggccctgcagaga

SEQ ID NO: 10109 - DNA, 20 bp, Artificial Sequence
  Description of Artificial Sequence: Synthetic oligonucleotide
  Target: APOC3; (+) strand; PAM type: NRG; PAM sequence: AGG
gcaaaaggccctgcagagag

SEQ ID NO: 10110 - DNA, 20 bp, Artificial Sequence
  Description of Artificial Sequence: Synthetic oligonucleotide
  Target: APOC3; (+) strand; PAM type: NRG; PAM sequence: GGG
caaaaggccctgcagagaga

SEQ ID NO: 10111 - DNA, 20 bp, Artificial Sequence
  Description of Artificial Sequence: Synthetic oligonucleotide
  Target: APOC3; (+) strand; PAM type: NRG; PAM sequence: TAG
aaggccctgcagagagaggg

SEQ ID NO: 10112 - DNA, 20 bp, Artificial Sequence
  Description of Artificial Sequence: Synthetic oligonucleotide
  Target: APOC3; (+) strand; PAM type: NRG; PAM sequence: AGG
aggccctgcagagagagggt

SEQ ID NO: 10113 - DNA, 20 bp, Artificial Sequence
  Description of Artificial Sequence: Synthetic oligonucleotide
  Target: APOC3; (+) strand; PAM type: NRG; PAM sequence: GGG
ggccctgcagagagagggta

SEQ ID NO: 10114 - DNA, 20 bp, Artificial Sequence
  Description of Artificial Sequence: Synthetic oligonucleotide
  Target: APOC3; (+) strand; PAM type: NRG; PAM sequence: AAG
cctgcagagagagggtaggg

SEQ ID NO: 10115 - DNA, 20 bp, Artificial Sequence
  Description of Artificial Sequence: Synthetic oligonucleotide
  Target: APOC3; (+) strand; PAM type: NRG; PAM sequence: AGG
ctgcagagagagggtaggga

SEQ ID NO: 10116 - DNA, 20 bp, Artificial Sequence
  Description of Artificial Sequence: Synthetic oligonucleotide
  Target: APOC3; (+) strand; PAM type: NRG; PAM sequence: CAG
agggtagggaaggcactgcc

SEQ ID NO: 10117 - DNA, 20 bp, Artificial Sequence
  Description of Artificial Sequence: Synthetic oligonucleotide
  Target: APOC3; (+) strand; PAM type: NRG; PAM sequence: AAG
aggcactgcccagatctgtg

SEQ ID NO: 10118 - DNA, 20 bp, Artificial Sequence
  Description of Artificial Sequence: Synthetic oligonucleotide
  Target: APOC3; (+) strand; PAM type: NRG; PAM sequence: CGG
tgaagccatgtgcgtgcacg

SEQ ID NO: 10119 - DNA, 20 bp, Artificial Sequence
  Description of Artificial Sequence: Synthetic oligonucleotide
  Target: APOC3; (+) strand; PAM type: NRG; PAM sequence: GGG
gaagccatgtgcgtgcacgc

SEQ ID NO: 10120 - DNA, 20 bp, Artificial Sequence
  Description of Artificial Sequence: Synthetic oligonucleotide
  Target: APOC3; (+) strand; PAM type: NRG; PAM sequence: GGG
aagccatgtgcgtgcacgcg

SEQ ID NO: 10121 - DNA, 20 bp, Artificial Sequence
  Description of Artificial Sequence: Synthetic oligonucleotide
  Target: APOC3; (+) strand; PAM type: NRG; PAM sequence: CAG
tgcgtgcacgcggggacatt

SEQ ID NO: 10122 - DNA, 20 bp, Artificial Sequence
  Description of Artificial Sequence: Synthetic oligonucleotide
  Target: APOC3; (+) strand; PAM type: NRG; PAM sequence: GAG
acgcggggacattcagacat

SEQ ID NO: 10123 - DNA, 20 bp, Artificial Sequence
  Description of Artificial Sequence: Synthetic oligonucleotide
  Target: APOC3; (+) strand; PAM type: NRG; PAM sequence: AAG
ggacattcagacatgagtgc

SEQ ID NO: 10124 - DNA, 20 bp, Artificial Sequence
  Description of Artificial Sequence: Synthetic oligonucleotide
  Target: APOC3; (+) strand; PAM type: NRG; PAM sequence: AGG
gacattcagacatgagtgca

SEQ ID NO: 10125 - DNA, 20 bp, Artificial Sequence
  Description of Artificial Sequence: Synthetic oligonucleotide
  Target: APOC3; (+) strand; PAM type: NRG; PAM sequence: GAG
cattcagacatgagtgcaag

SEQ ID NO: 10126 - DNA, 20 bp, Artificial Sequence
  Description of Artificial Sequence: Synthetic oligonucleotide
  Target: APOC3; (+) strand; PAM type: NRG; PAM sequence: AGG
attcagacatgagtgcaagg

SEQ ID NO: 10127 - DNA, 20 bp, Artificial Sequence
  Description of Artificial Sequence: Synthetic oligonucleotide
  Target: APOC3; (+) strand; PAM type: NRG; PAM sequence: GGG
ttcagacatgagtgcaagga

SEQ ID NO: 10128 - DNA, 20 bp, Artificial Sequence
  Description of Artificial Sequence: Synthetic oligonucleotide
  Target: APOC3; (+) strand; PAM type: NRG; PAM sequence: GAG
tgagtgcaaggagggaccgt

SEQ ID NO: 10129 - DNA, 20 bp, Artificial Sequence
  Description of Artificial Sequence: Synthetic oligonucleotide
  Target: APOC3; (+) strand; PAM type: NRG; PAM sequence: CAG
gtgcaaggagggaccgtgag

SEQ ID NO: 10130 - DNA, 20 bp, Artificial Sequence
  Description of Artificial Sequence: Synthetic oligonucleotide
  Target: APOC3; (+) strand; PAM type: NRG; PAM sequence: AGG
tgcaaggagggaccgtgagc

SEQ ID NO: 10131 - DNA, 20 bp, Artificial Sequence
  Description of Artificial Sequence: Synthetic oligonucleotide
  Target: APOC3; (+) strand; PAM type: NRG; PAM sequence: GGG
gcaaggagggaccgtgagca

SEQ ID NO: 10132 - DNA, 20 bp, Artificial Sequence
  Description of Artificial Sequence: Synthetic oligonucleotide
  Target: APOC3; (+) strand; PAM type: NRG; PAM sequence: GAG
aaggagggaccgtgagcagg

SEQ ID NO: 10133 - DNA, 20 bp, Artificial Sequence
  Description of Artificial Sequence: Synthetic oligonucleotide
  Target: APOC3; (+) strand; PAM type: NRG; PAM sequence: AGG
aggagggaccgtgagcaggg

SEQ ID NO: 10134 - DNA, 20 bp, Artificial Sequence
  Description of Artificial Sequence: Synthetic oligonucleotide
  Target: APOC3; (+) strand; PAM type: NRG; PAM sequence: GAG
cgtgagcagggaggtcatgt

SEQ ID NO: 10135 - DNA, 20 bp, Artificial Sequence
  Description of Artificial Sequence: Synthetic oligonucleotide
  Target: APOC3; (+) strand; PAM type: NRG; PAM sequence: CAG
ggaggtcatgtgagaataca

SEQ ID NO: 10136 - DNA, 20 bp, Artificial Sequence
  Description of Artificial Sequence: Synthetic oligonucleotide
  Target: APOC3; (+) strand; PAM type: NRG; PAM sequence: AGG
gaggtcatgtgagaatacac

SEQ ID NO: 10137 - DNA, 20 bp, Artificial Sequence
  Description of Artificial Sequence: Synthetic oligonucleotide
  Target: APOC3; (+) strand; PAM type: NRG; PAM sequence: GAG
ctgcacacccatgtgaactt

SEQ ID NO: 10138 - DNA, 20 bp, Artificial Sequence
  Description of Artificial Sequence: Synthetic oligonucleotide
  Target: APOC3; (+) strand; PAM type: NRG; PAM sequence: CAG
acccatgtgaacttgagtgc

SEQ ID NO: 10139 - DNA, 20 bp, Artificial Sequence
  Description of Artificial Sequence: Synthetic oligonucleotide
  Target: APOC3; (+) strand; PAM type: NRG; PAM sequence: AGG
cccatgtgaacttgagtgcc

SEQ ID NO: 10140 - DNA, 20 bp, Artificial Sequence
  Description of Artificial Sequence: Synthetic oligonucleotide
  Target: APOC3; (+) strand; PAM type: NRG; PAM sequence: TAG
tttttttttttttttttttt

SEQ ID NO: 10141 - DNA, 20 bp, Artificial Sequence
  Description of Artificial Sequence: Synthetic oligonucleotide
  Target: APOC3; (+) strand; PAM type: NRG; PAM sequence: TGG
tttttttttttttttttagc

SEQ ID NO: 10142 - DNA, 20 bp, Artificial Sequence
  Description of Artificial Sequence: Synthetic oligonucleotide
  Target: APOC3; (+) strand; PAM type: NRG; PAM sequence: GAG
tttttttttttttttagctg

SEQ ID NO: 10143 - DNA, 20 bp, Artificial Sequence
  Description of Artificial Sequence: Synthetic oligonucleotide
  Target: APOC3; (+) strand; PAM type: NRG; PAM sequence: CAG
tggagtcttgctccgtcgcc

SEQ ID NO: 10144 - DNA, 20 bp, Artificial Sequence
  Description of Artificial Sequence: Synthetic oligonucleotide
  Target: APOC3; (+) strand; PAM type: NRG; PAM sequence: AGG
ggagtcttgctccgtcgccc

SEQ ID NO: 10145 - DNA, 20 bp, Artificial Sequence
  Description of Artificial Sequence: Synthetic oligonucleotide
  Target: APOC3; (+) strand; PAM type: NRG; PAM sequence: TGG
tcttgctccgtcgcccaggc

SEQ ID NO: 10146 - DNA, 20 bp, Artificial Sequence
  Description of Artificial Sequence: Synthetic oligonucleotide
  Target: APOC3; (+) strand; PAM type: NRG; PAM sequence: GAG
ttgctccgtcgcccaggctg

SEQ ID NO: 10147 - DNA, 20 bp, Artificial Sequence
  Description of Artificial Sequence: Synthetic oligonucleotide
  Target: APOC3; (+) strand; PAM type: NRG; PAM sequence: CAG
ccgtcgcccaggctggagtg

SEQ ID NO: 10148 - DNA, 20 bp, Artificial Sequence
  Description of Artificial Sequence: Synthetic oligonucleotide
  Target: APOC3; (+) strand; PAM type: NRG; PAM sequence: TGG
tcgcccaggctggagtgcag

SEQ ID NO: 10149 - DNA, 20 bp, Artificial Sequence
  Description of Artificial Sequence: Synthetic oligonucleotide
  Target: APOC3; (+) strand; PAM type: NRG; PAM sequence: CGG
ggagtgcagtggcatgattt

SEQ ID NO: 10150 - DNA, 20 bp, Artificial Sequence
  Description of Artificial Sequence: Synthetic oligonucleotide
  Target: APOC3; (+) strand; PAM type: NRG; PAM sequence: CAG
tcactgtgacctctgcctcc

SEQ ID NO: 10151 - DNA, 20 bp, Artificial Sequence
  Description of Artificial Sequence: Synthetic oligonucleotide
  Target: APOC3; (+) strand; PAM type: NRG; PAM sequence: AGG
cactgtgacctctgcctccc

SEQ ID NO: 10152 - DNA, 20 bp, Artificial Sequence
  Description of Artificial Sequence: Synthetic oligonucleotide
  Target: APOC3; (+) strand; PAM type: NRG; PAM sequence: AAG
gacctctgcctcccaggttc

SEQ ID NO: 10153 - DNA, 20 bp, Artificial Sequence
  Description of Artificial Sequence: Synthetic oligonucleotide
  Target: APOC3; (+) strand; PAM type: NRG; PAM sequence: CAG
ttcaagcgattctcctgcct

SEQ ID NO: 10154 - DNA, 20 bp, Artificial Sequence
  Description of Artificial Sequence: Synthetic oligonucleotide
  Target: APOC3; (+) strand; PAM type: NRG; PAM sequence: TAG
ttctcctgcctcagccttcc

SEQ ID NO: 10155 - DNA, 20 bp, Artificial Sequence
  Description of Artificial Sequence: Synthetic oligonucleotide
  Target: APOC3; (+) strand; PAM type: NRG; PAM sequence: TAG
tcctgcctcagccttcctag

SEQ ID NO: 10156 - DNA, 20 bp, Artificial Sequence
  Description of Artificial Sequence: Synthetic oligonucleotide
  Target: APOC3; (+) strand; PAM type: NRG; PAM sequence: TGG
gcctcagccttcctagtagc

SEQ ID NO: 10157 - DNA, 20 bp, Artificial Sequence
  Description of Artificial Sequence: Synthetic oligonucleotide
  Target: APOC3; (+) strand; PAM type: NRG; PAM sequence: GGG
cctcagccttcctagtagct

SEQ ID NO: 10158 - DNA, 20 bp, Artificial Sequence
  Description of Artificial Sequence: Synthetic oligonucleotide
  Target: APOC3; (+) strand; PAM type: NRG; PAM sequence: CGG
cttcctagtagctgggatta

SEQ ID NO: 10159 - DNA, 20 bp, Artificial Sequence
  Description of Artificial Sequence: Synthetic oligonucleotide
  Target: APOC3; (+) strand; PAM type: NRG; PAM sequence: GGG
ttcctagtagctgggattac

SEQ ID NO: 10160 - DNA, 20 bp, Artificial Sequence
  Description of Artificial Sequence: Synthetic oligonucleotide
  Target: APOC3; (+) strand; PAM type: NRG; PAM sequence: AAG
gtagctgggattacgggtgc

SEQ ID NO: 10161 - DNA, 20 bp, Artificial Sequence
  Description of Artificial Sequence: Synthetic oligonucleotide
  Target: APOC3; (+) strand; PAM type: NRG; PAM sequence: CAG
cgggtgcaagccaccatgcc

SEQ ID NO: 10162 - DNA, 20 bp, Artificial Sequence
  Description of Artificial Sequence: Synthetic oligonucleotide
  Target: APOC3; (+) strand; PAM type: NRG; PAM sequence: TAG
gctgattttttttgtatttt

SEQ ID NO: 10163 - DNA, 20 bp, Artificial Sequence
  Description of Artificial Sequence: Synthetic oligonucleotide
  Target: APOC3; (+) strand; PAM type: NRG; PAM sequence: TAG
gattttttttgtatttttag

SEQ ID NO: 10164 - DNA, 20 bp, Artificial Sequence
  Description of Artificial Sequence: Synthetic oligonucleotide
  Target: APOC3; (+) strand; PAM type: NRG; PAM sequence: GAG
ttttttttgtatttttagta

SEQ ID NO: 10165 - DNA, 20 bp, Artificial Sequence
  Description of Artificial Sequence: Synthetic oligonucleotide
  Target: APOC3; (+) strand; PAM type: NRG; PAM sequence: CAG
ttttgtatttttagtagaga

SEQ ID NO: 10166 - DNA, 20 bp, Artificial Sequence
  Description of Artificial Sequence: Synthetic oligonucleotide
  Target: APOC3; (+) strand; PAM type: NRG; PAM sequence: AGG
tttgtatttttagtagagac

SEQ ID NO: 10167 - DNA, 20 bp, Artificial Sequence
  Description of Artificial Sequence: Synthetic oligonucleotide
  Target: APOC3; (+) strand; PAM type: NRG; PAM sequence: GGG
ttgtatttttagtagagaca

SEQ ID NO: 10168 - DNA, 20 bp, Artificial Sequence
  Description of Artificial Sequence: Synthetic oligonucleotide
  Target: APOC3; (+) strand; PAM type: NRG; PAM sequence: TGG
gagacagggtttcaccatat

SEQ ID NO: 10169 - DNA, 20 bp, Artificial Sequence
  Description of Artificial Sequence: Synthetic oligonucleotide
  Target: APOC3; (+) strand; PAM type: NRG; PAM sequence: CAG
cagggtttcaccatattggc

SEQ ID NO: 10170 - DNA, 20 bp, Artificial Sequence
  Description of Artificial Sequence: Synthetic oligonucleotide
  Target: APOC3; (+) strand; PAM type: NRG; PAM sequence: AGG
agggtttcaccatattggcc

SEQ ID NO: 10171 - DNA, 20 bp, Artificial Sequence
  Description of Artificial Sequence: Synthetic oligonucleotide
  Target: APOC3; (+) strand; PAM type: NRG; PAM sequence: TGG
tttcaccatattggccaggc

SEQ ID NO: 10172 - DNA, 20 bp, Artificial Sequence
  Description of Artificial Sequence: Synthetic oligonucleotide
  Target: APOC3; (+) strand; PAM type: NRG; PAM sequence: TGG
ccaggctggtctcaaactcc

SEQ ID NO: 10173 - DNA, 20 bp, Artificial Sequence
  Description of Artificial Sequence: Synthetic oligonucleotide
  Target: APOC3; (+) strand; PAM type: NRG; PAM sequence: AAG
ggtctcaaactcctggcctg

SEQ ID NO: 10174 - DNA, 20 bp, Artificial Sequence
  Description of Artificial Sequence: Synthetic oligonucleotide
  Target: APOC3; (+) strand; PAM type: NRG; PAM sequence: CAG
ctgaagtgatacgcccacct

SEQ ID NO: 10175 - DNA, 20 bp, Artificial Sequence
  Description of Artificial Sequence: Synthetic oligonucleotide
  Target: APOC3; (+) strand; PAM type: NRG; PAM sequence: AAG
acgcccacctcagcctccca

SEQ ID NO: 10176 - DNA, 20 bp, Artificial Sequence
  Description of Artificial Sequence: Synthetic oligonucleotide
  Target: APOC3; (+) strand; PAM type: NRG; PAM sequence: TGG
acctcagcctcccaaagtgc

SEQ ID NO: 10177 - DNA, 20 bp, Artificial Sequence
  Description of Artificial Sequence: Synthetic oligonucleotide
  Target: APOC3; (+) strand; PAM type: NRG; PAM sequence: GGG
cctcagcctcccaaagtgct

SEQ ID NO: 10178 - DNA, 20 bp, Artificial Sequence
  Description of Artificial Sequence: Synthetic oligonucleotide
  Target: APOC3; (+) strand; PAM type: NRG; PAM sequence: CAG
ctcccaaagtgctgggatta

SEQ ID NO: 10179 - DNA, 20 bp, Artificial Sequence
  Description of Artificial Sequence: Synthetic oligonucleotide
  Target: APOC3; (+) strand; PAM type: NRG; PAM sequence: AGG
tcccaaagtgctgggattac

SEQ ID NO: 10180 - DNA, 20 bp, Artificial Sequence
  Description of Artificial Sequence: Synthetic oligonucleotide
  Target: APOC3; (+) strand; PAM type: NRG; PAM sequence: GAG
agtgctgggattacaggctt

SEQ ID NO: 10181 - DNA, 20 bp, Artificial Sequence
  Description of Artificial Sequence: Synthetic oligonucleotide
  Target: APOC3; (+) strand; PAM type: NRG; PAM sequence: TGG
cgcactcttttcaataatca

SEQ ID NO: 10182 - DNA, 20 bp, Artificial Sequence
  Description of Artificial Sequence: Synthetic oligonucleotide
  Target: APOC3; (+) strand; PAM type: NRG; PAM sequence: TGG
ctcttttcaataatcatgga

SEQ ID NO: 10183 - DNA, 20 bp, Artificial Sequence
  Description of Artificial Sequence: Synthetic oligonucleotide
  Target: APOC3; (+) strand; PAM type: NRG; PAM sequence: CAG
tttcaataatcatggatggc

SEQ ID NO: 10184 - DNA, 20 bp, Artificial Sequence
  Description of Artificial Sequence: Synthetic oligonucleotide
  Target: APOC3; (+) strand; PAM type: NRG; PAM sequence: AGG
ttcaataatcatggatggcc

SEQ ID NO: 10185 - DNA, 20 bp, Artificial Sequence
  Description of Artificial Sequence: Synthetic oligonucleotide
  Target: APOC3; (+) strand; PAM type: NRG; PAM sequence: GGG
tcaataatcatggatggcca

SEQ ID NO: 10186 - DNA, 20 bp, Artificial Sequence
  Description of Artificial Sequence: Synthetic oligonucleotide
  Target: APOC3; (+) strand; PAM type: NRG; PAM sequence: GGG
caataatcatggatggccag

SEQ ID NO: 10187 - DNA, 20 bp, Artificial Sequence
  Description of Artificial Sequence: Synthetic oligonucleotide
  Target: APOC3; (+) strand; PAM type: NRG; PAM sequence: CAG
atcatggatggccaggggtg

SEQ ID NO: 10188 - DNA, 20 bp, Artificial Sequence
  Description of Artificial Sequence: Synthetic oligonucleotide
  Target: APOC3; (+) strand; PAM type: NRG; PAM sequence: AGG
tcatggatggccaggggtgc

SEQ ID NO: 10189 - DNA, 20 bp, Artificial Sequence
  Description of Artificial Sequence: Synthetic oligonucleotide
  Target: APOC3; (+) strand; PAM type: NRG; PAM sequence: GGG
catggatggccaggggtgca

SEQ ID NO: 10190 - DNA, 20 bp, Artificial Sequence
  Description of Artificial Sequence: Synthetic oligonucleotide
  Target: APOC3; (+) strand; PAM type: NRG; PAM sequence: AAG
ccaggggtgcagggtctaaa

SEQ ID NO: 10191 - DNA, 20 bp, Artificial Sequence
  Description of Artificial Sequence: Synthetic oligonucleotide
  Target: APOC3; (+) strand; PAM type: NRG; PAM sequence: CGG
ggtgcagggtctaaaaagcg

SEQ ID NO: 10192 - DNA, 20 bp, Artificial Sequence
  Description of Artificial Sequence: Synthetic oligonucleotide
  Target: APOC3; (+) strand; PAM type: NRG; PAM sequence: TAG
agggtctaaaaagcgcggcc

SEQ ID NO: 10193 - DNA, 20 bp, Artificial Sequence
  Description of Artificial Sequence: Synthetic oligonucleotide
  Target: APOC3; (+) strand; PAM type: NRG; PAM sequence: TGG
tagcccatcctgctgttcac

SEQ ID NO: 10194 - DNA, 20 bp, Artificial Sequence
  Description of Artificial Sequence: Synthetic oligonucleotide
  Target: APOC3; (+) strand; PAM type: NRG; PAM sequence: GGG
agcccatcctgctgttcact

SEQ ID NO: 10195 - DNA, 20 bp, Artificial Sequence
  Description of Artificial Sequence: Synthetic oligonucleotide
  Target: APOC3; (+) strand; PAM type: NRG; PAM sequence: AAG
catcctgctgttcactgggc

SEQ ID NO: 10196 - DNA, 20 bp, Artificial Sequence
  Description of Artificial Sequence: Synthetic oligonucleotide
  Target: APOC3; (+) strand; PAM type: NRG; PAM sequence: CAG
tcactgggcaagcgacgtca

SEQ ID NO: 10197 - DNA, 20 bp, Artificial Sequence
  Description of Artificial Sequence: Synthetic oligonucleotide
  Target: APOC3; (+) strand; PAM type: NRG; PAM sequence: AGG
cactgggcaagcgacgtcac

SEQ ID NO: 10198 - DNA, 20 bp, Artificial Sequence
  Description of Artificial Sequence: Synthetic oligonucleotide
  Target: APOC3; (+) strand; PAM type: NRG; PAM sequence: CAG
ggcaagcgacgtcacaggtc

SEQ ID NO: 10199 - DNA, 20 bp, Artificial Sequence
  Description of Artificial Sequence: Synthetic oligonucleotide
  Target: APOC3; (+) strand; PAM type: NRG; PAM sequence: AGG
gcaagcgacgtcacaggtcc

SEQ ID NO: 10200 - DNA, 20 bp, Artificial Sequence
  Description of Artificial Sequence: Synthetic oligonucleotide
  Target: APOC3; (+) strand; PAM type: NRG; PAM sequence: CAG
gacgtcacaggtccaggctt

SEQ ID NO: 10201 - DNA, 20 bp, Artificial Sequence
  Description of Artificial Sequence: Synthetic oligonucleotide
  Target: APOC3; (+) strand; PAM type: NRG; PAM sequence: TGG
catccatgctctgcgtctga

SEQ ID NO: 10202 - DNA, 20 bp, Artificial Sequence
  Description of Artificial Sequence: Synthetic oligonucleotide
  Target: APOC3; (+) strand; PAM type: NRG; PAM sequence: TAG
ctctgcgtctgatggcaatc

SEQ ID NO: 10203 - DNA, 20 bp, Artificial Sequence
  Description of Artificial Sequence: Synthetic oligonucleotide
  Target: APOC3; (+) strand; PAM type: NRG; PAM sequence: CAG
gcgtctgatggcaatctagc

SEQ ID NO: 10204 - DNA, 20 bp, Artificial Sequence
  Description of Artificial Sequence: Synthetic oligonucleotide
  Target: APOC3; (+) strand; PAM type: NRG; PAM sequence: AGG
cgtctgatggcaatctagcc

SEQ ID NO: 10205 - DNA, 20 bp, Artificial Sequence
  Description of Artificial Sequence: Synthetic oligonucleotide
  Target: APOC3; (+) strand; PAM type: NRG; PAM sequence: TGG
atggcaatctagccaggatg

SEQ ID NO: 10206 - DNA, 20 bp, Artificial Sequence
  Description of Artificial Sequence: Synthetic oligonucleotide
  Target: APOC3; (+) strand; PAM type: NRG; PAM sequence: GGG
tggcaatctagccaggatgt

SEQ ID NO: 10207 - DNA, 20 bp, Artificial Sequence
  Description of Artificial Sequence: Synthetic oligonucleotide
  Target: APOC3; (+) strand; PAM type: NRG; PAM sequence: GGG
ggcaatctagccaggatgtg

SEQ ID NO: 10208 - DNA, 20 bp, Artificial Sequence
  Description of Artificial Sequence: Synthetic oligonucleotide
  Target: APOC3; (+) strand; PAM type: NRG; PAM sequence: AAG
aatctagccaggatgtgggg

SEQ ID NO: 10209 - DNA, 20 bp, Artificial Sequence
  Description of Artificial Sequence: Synthetic oligonucleotide
  Target: APOC3; (+) strand; PAM type: NRG; PAM sequence: AGG
atctagccaggatgtgggga

SEQ ID NO: 10210 - DNA, 20 bp, Artificial Sequence
  Description of Artificial Sequence: Synthetic oligonucleotide
  Target: APOC3; (+) strand; PAM type: NRG; PAM sequence: GGG
tctagccaggatgtggggaa

SEQ ID NO: 10211 - DNA, 20 bp, Artificial Sequence
  Description of Artificial Sequence: Synthetic oligonucleotide
  Target: APOC3; (+) strand; PAM type: NRG; PAM sequence: GAG
tagccaggatgtggggaagg

SEQ ID NO: 10212 - DNA, 20 bp, Artificial Sequence
  Description of Artificial Sequence: Synthetic oligonucleotide
  Target: APOC3; (+) strand; PAM type: NRG; PAM sequence: AGG
agccaggatgtggggaaggg

SEQ ID NO: 10213 - DNA, 20 bp, Artificial Sequence
  Description of Artificial Sequence: Synthetic oligonucleotide
  Target: APOC3; (+) strand; PAM type: NRG; PAM sequence: CAG
gatgtggggaagggaggatg

SEQ ID NO: 10214 - DNA, 20 bp, Artificial Sequence
  Description of Artificial Sequence: Synthetic oligonucleotide
  Target: APOC3; (+) strand; PAM type: NRG; PAM sequence: GAG
tggggaagggaggatgcagt

SEQ ID NO: 10215 - DNA, 20 bp, Artificial Sequence
  Description of Artificial Sequence: Synthetic oligonucleotide
  Target: APOC3; (+) strand; PAM type: NRG; PAM sequence: GAG
gggaagggaggatgcagtga

SEQ ID NO: 10216 - DNA, 20 bp, Artificial Sequence
  Description of Artificial Sequence: Synthetic oligonucleotide
  Target: APOC3; (+) strand; PAM type: NRG; PAM sequence: CAG
gggaggatgcagtgagagca

SEQ ID NO: 10217 - DNA, 20 bp, Artificial Sequence
  Description of Artificial Sequence: Synthetic oligonucleotide
  Target: APOC3; (+) strand; PAM type: NRG; PAM sequence: GAG
tgcagtgagagcacagatat

SEQ ID NO: 10218 - DNA, 20 bp, Artificial Sequence
  Description of Artificial Sequence: Synthetic oligonucleotide
  Target: APOC3; (+) strand; PAM type: NRG; PAM sequence: GAG
cagtgagagcacagatatga

SEQ ID NO: 10219 - DNA, 20 bp, Artificial Sequence
  Description of Artificial Sequence: Synthetic oligonucleotide
  Target: APOC3; (+) strand; PAM type: NRG; PAM sequence: TGG
gcacagatatgagagcatct

SEQ ID NO: 10220 - DNA, 20 bp, Artificial Sequence
  Description of Artificial Sequence: Synthetic oligonucleotide
  Target: APOC3; (+) strand; PAM type: NRG; PAM sequence: AAG
ggaaataaaaatgtacctgc

SEQ ID NO: 10221 - DNA, 20 bp, Artificial Sequence
  Description of Artificial Sequence: Synthetic oligonucleotide
  Target: APOC3; (+) strand; PAM type: NRG; PAM sequence: GAG
aaataaaaatgtacctgcaa

SEQ ID NO: 10222 - DNA, 20 bp, Artificial Sequence
  Description of Artificial Sequence: Synthetic oligonucleotide
  Target: APOC3; (+) strand; PAM type: NRG; PAM sequence: AGG
aataaaaatgtacctgcaag

SEQ ID NO: 10223 - DNA, 20 bp, Artificial Sequence
  Description of Artificial Sequence: Synthetic oligonucleotide
  Target: APOC3; (+) strand; PAM type: NRG; PAM sequence: TGG
aaaaatgtacctgcaagagg

SEQ ID NO: 10224 - DNA, 20 bp, Artificial Sequence
  Description of Artificial Sequence: Synthetic oligonucleotide
  Target: APOC3; (+) strand; PAM type: NRG; PAM sequence: TGG
aatgtacctgcaagaggtgg

SEQ ID NO: 10225 - DNA, 20 bp, Artificial Sequence
  Description of Artificial Sequence: Synthetic oligonucleotide
  Target: APOC3; (+) strand; PAM type: NRG; PAM sequence: CAG
tggtggtgaattttcttact

SEQ ID NO: 10226 - DNA, 20 bp, Artificial Sequence
  Description of Artificial Sequence: Synthetic oligonucleotide
  Target: APOC3; (+) strand; PAM type: NRG; PAM sequence: AGG
ggtggtgaattttcttactc

SEQ ID NO: 10227 - DNA, 20 bp, Artificial Sequence
  Description of Artificial Sequence: Synthetic oligonucleotide
  Target: APOC3; (+) strand; PAM type: NRG; PAM sequence: CAG
gtgaattttcttactcaggc

SEQ ID NO: 10228 - DNA, 20 bp, Artificial Sequence
  Description of Artificial Sequence: Synthetic oligonucleotide
  Target: APOC3; (+) strand; PAM type: NRG; PAM sequence: CAG
ttactcaggccagcttctgc

SEQ ID NO: 10229 - DNA, 20 bp, Artificial Sequence
  Description of Artificial Sequence: Synthetic oligonucleotide
  Target: APOC3; (+) strand; PAM type: NRG; PAM sequence: AGG
tactcaggccagcttctgcc

SEQ ID NO: 10230 - DNA, 20 bp, Artificial Sequence
  Description of Artificial Sequence: Synthetic oligonucleotide
  Target: APOC3; (+) strand; PAM type: NRG; PAM sequence: GGG
actcaggccagcttctgcca

SEQ ID NO: 10231 - DNA, 20 bp, Artificial Sequence
  Description of Artificial Sequence: Synthetic oligonucleotide
  Target: APOC3; (+) strand; PAM type: NRG; PAM sequence: TGG
aggccagcttctgccagggc

SEQ ID NO: 10232 - DNA, 20 bp, Artificial Sequence
  Description of Artificial Sequence: Synthetic oligonucleotide
  Target: APOC3; (+) strand; PAM type: NRG; PAM sequence: CAG
ccagcttctgccagggctgg

SEQ ID NO: 10233 - DNA, 20 bp, Artificial Sequence
  Description of Artificial Sequence: Synthetic oligonucleotide
  Target: APOC3; (+) strand; PAM type: NRG; PAM sequence: AAG
cttctgccagggctggcaga

SEQ ID NO: 10234 - DNA, 20 bp, Artificial Sequence
  Description of Artificial Sequence: Synthetic oligonucleotide
  Target: APOC3; (+) strand; PAM type: NRG; PAM sequence: GAG
tctgccagggctggcagaaa

SEQ ID NO: 10235 - DNA, 20 bp, Artificial Sequence
  Description of Artificial Sequence: Synthetic oligonucleotide
  Target: APOC3; (+) strand; PAM type: NRG; PAM sequence: AGG
ctgccagggctggcagaaag

SEQ ID NO: 10236 - DNA, 20 bp, Artificial Sequence
  Description of Artificial Sequence: Synthetic oligonucleotide
  Target: APOC3; (+) strand; PAM type: NRG; PAM sequence: GGG
tgccagggctggcagaaaga

SEQ ID NO: 10237 - DNA, 20 bp, Artificial Sequence
  Description of Artificial Sequence: Synthetic oligonucleotide
  Target: APOC3; (+) strand; PAM type: NRG; PAM sequence: GGG
gccagggctggcagaaagag

SEQ ID NO: 10238 - DNA, 20 bp, Artificial Sequence
  Description of Artificial Sequence: Synthetic oligonucleotide
  Target: APOC3; (+) strand; PAM type: NRG; PAM sequence: GGG
ccagggctggcagaaagagg

SEQ ID NO: 10239 - DNA, 20 bp, Artificial Sequence
  Description of Artificial Sequence: Synthetic oligonucleotide
  Target: APOC3; (+) strand; PAM type: NRG; PAM sequence: TGG
gggctggcagaaagaggggg

SEQ ID NO: 10240 - DNA, 20 bp, Artificial Sequence
  Description of Artificial Sequence: Synthetic oligonucleotide
  Target: APOC3; (+) strand; PAM type: NRG; PAM sequence: TGG
ggcagaaagagggggtggca

SEQ ID NO: 10241 - DNA, 20 bp, Artificial Sequence
  Description of Artificial Sequence: Synthetic oligonucleotide
  Target: APOC3; (+) strand; PAM type: NRG; PAM sequence: TGG
aaagagggggtggcatggca

SEQ ID NO: 10242 - DNA, 20 bp, Artificial Sequence
  Description of Artificial Sequence: Synthetic oligonucleotide
  Target: APOC3; (+) strand; PAM type: NRG; PAM sequence: GAG
agagggggtggcatggcatg

SEQ ID NO: 10243 - DNA, 20 bp, Artificial Sequence
  Description of Artificial Sequence: Synthetic oligonucleotide
  Target: APOC3; (+) strand; PAM type: NRG; PAM sequence: CAG
ggtggcatggcatggagccg

SEQ ID NO: 10244 - DNA, 20 bp, Artificial Sequence
  Description of Artificial Sequence: Synthetic oligonucleotide
  Target: APOC3; (+) strand; PAM type: NRG; PAM sequence: AGG
gtggcatggcatggagccgc

SEQ ID NO: 10245 - DNA, 20 bp, Artificial Sequence
  Description of Artificial Sequence: Synthetic oligonucleotide
  Target: APOC3; (+) strand; PAM type: NRG; PAM sequence: GGG
tggcatggcatggagccgca

SEQ ID NO: 10246 - DNA, 20 bp, Artificial Sequence
  Description of Artificial Sequence: Synthetic oligonucleotide
  Target: APOC3; (+) strand; PAM type: NRG; PAM sequence: GGG
ggcatggcatggagccgcag

SEQ ID NO: 10247 - DNA, 20 bp, Artificial Sequence
  Description of Artificial Sequence: Synthetic oligonucleotide
  Target: APOC3; (+) strand; PAM type: NRG; PAM sequence: GGG
gcatggcatggagccgcagg

SEQ ID NO: 10248 - DNA, 20 bp, Artificial Sequence
  Description of Artificial Sequence: Synthetic oligonucleotide
  Target: APOC3; (+) strand; PAM type: NRG; PAM sequence: TGG
tggcatggagccgcaggggg

SEQ ID NO: 10249 - DNA, 20 bp, Artificial Sequence
  Description of Artificial Sequence: Synthetic oligonucleotide
  Target: APOC3; (+) strand; PAM type: NRG; PAM sequence: GAG
gcatggagccgcagggggtg

SEQ ID NO: 10250 - DNA, 20 bp, Artificial Sequence
  Description of Artificial Sequence: Synthetic oligonucleotide
  Target: APOC3; (+) strand; PAM type: NRG; PAM sequence: AGG
catggagccgcagggggtgg

SEQ ID NO: 10251 - DNA, 20 bp, Artificial Sequence
  Description of Artificial Sequence: Synthetic oligonucleotide
  Target: APOC3; (+) strand; PAM type: NRG; PAM sequence: TGG
agccgcagggggtggaggac

SEQ ID NO: 10252 - DNA, 20 bp, Artificial Sequence
  Description of Artificial Sequence: Synthetic oligonucleotide
  Target: APOC3; (+) strand; PAM type: NRG; PAM sequence: GAG
tggcttccactgctgtgcct

SEQ ID NO: 10253 - DNA, 20 bp, Artificial Sequence
  Description of Artificial Sequence: Synthetic oligonucleotide
  Target: APOC3; (+) strand; PAM type: NRG; PAM sequence: AGG
ggcttccactgctgtgcctg

SEQ ID NO: 10254 - DNA, 20 bp, Artificial Sequence
  Description of Artificial Sequence: Synthetic oligonucleotide
  Target: APOC3; (+) strand; PAM type: NRG; PAM sequence: AAG
ttccactgctgtgcctgagg

SEQ ID NO: 10255 - DNA, 20 bp, Artificial Sequence
  Description of Artificial Sequence: Synthetic oligonucleotide
  Target: APOC3; (+) strand; PAM type: NRG; PAM sequence: CGG
tgctgtgcctgaggaagccg

SEQ ID NO: 10256 - DNA, 20 bp, Artificial Sequence
  Description of Artificial Sequence: Synthetic oligonucleotide
  Target: APOC3; (+) strand; PAM type: NRG; PAM sequence: TGG
gaggaagccgcggctgtttc

SEQ ID NO: 10257 - DNA, 20 bp, Artificial Sequence
  Description of Artificial Sequence: Synthetic oligonucleotide
  Target: APOC3; (+) strand; PAM type: NRG; PAM sequence: GGG
aggaagccgcggctgtttct

SEQ ID NO: 10258 - DNA, 20 bp, Artificial Sequence
  Description of Artificial Sequence: Synthetic oligonucleotide
  Target: APOC3; (+) strand; PAM type: NRG; PAM sequence: CGG
aagccgcggctgtttctggg

SEQ ID NO: 10259 - DNA, 20 bp, Artificial Sequence
  Description of Artificial Sequence: Synthetic oligonucleotide
  Target: APOC3; (+) strand; PAM type: NRG; PAM sequence: GGG
agccgcggctgtttctgggc

SEQ ID NO: 10260 - DNA, 20 bp, Artificial Sequence
  Description of Artificial Sequence: Synthetic oligonucleotide
  Target: APOC3; (+) strand; PAM type: NRG; PAM sequence: TGG
gcggctgtttctgggcggga

SEQ ID NO: 10261 - DNA, 20 bp, Artificial Sequence
  Description of Artificial Sequence: Synthetic oligonucleotide
  Target: APOC3; (+) strand; PAM type: NRG; PAM sequence: GGG
cggctgtttctgggcgggat

SEQ ID NO: 10262 - DNA, 20 bp, Artificial Sequence
  Description of Artificial Sequence: Synthetic oligonucleotide
  Target: APOC3; (+) strand; PAM type: NRG; PAM sequence: GAG
gctgtttctgggcgggatgg

SEQ ID NO: 10263 - DNA, 20 bp, Artificial Sequence
  Description of Artificial Sequence: Synthetic oligonucleotide
  Target: APOC3; (+) strand; PAM type: NRG; PAM sequence: TAG
gtttctgggcgggatgggag

SEQ ID NO: 10264 - DNA, 20 bp, Artificial Sequence
  Description of Artificial Sequence: Synthetic oligonucleotide
  Target: APOC3; (+) strand; PAM type: NRG; PAM sequence: TGG
tctgggcgggatgggagtag

SEQ ID NO: 10265 - DNA, 20 bp, Artificial Sequence
  Description of Artificial Sequence: Synthetic oligonucleotide
  Target: APOC3; (+) strand; PAM type: NRG; PAM sequence: GGG
ctgggcgggatgggagtagt

SEQ ID NO: 10266 - DNA, 20 bp, Artificial Sequence
  Description of Artificial Sequence: Synthetic oligonucleotide
  Target: APOC3; (+) strand; PAM type: NRG; PAM sequence: GAG
gggcgggatgggagtagtgg

SEQ ID NO: 10267 - DNA, 20 bp, Artificial Sequence
  Description of Artificial Sequence: Synthetic oligonucleotide
  Target: APOC3; (+) strand; PAM type: NRG; PAM sequence: AGG
ggcgggatgggagtagtggg

SEQ ID NO: 10268 - DNA, 20 bp, Artificial Sequence
  Description of Artificial Sequence: Synthetic oligonucleotide
  Target: APOC3; (+) strand; PAM type: NRG; PAM sequence: GGG
gcgggatgggagtagtggga

SEQ ID NO: 10269 - DNA, 20 bp, Artificial Sequence
  Description of Artificial Sequence: Synthetic oligonucleotide
  Target: APOC3; (+) strand; PAM type: NRG; PAM sequence: GGG
cgggatgggagtagtgggag

SEQ ID NO: 10270 - DNA, 20 bp, Artificial Sequence
  Description of Artificial Sequence: Synthetic oligonucleotide
  Target: APOC3; (+) strand; PAM type: NRG; PAM sequence: GGG
gggatgggagtagtgggagg

SEQ ID NO: 10271 - DNA, 20 bp, Artificial Sequence
  Description of Artificial Sequence: Synthetic oligonucleotide
  Target: APOC3; (+) strand; PAM type: NRG; PAM sequence: TGG
gagtagtgggagggggatac

SEQ ID NO: 10272 - DNA, 20 bp, Artificial Sequence
  Description of Artificial Sequence: Synthetic oligonucleotide
  Target: APOC3; (+) strand; PAM type: NRG; PAM sequence: GAG
gagggggatactggccttgt

SEQ ID NO: 10273 - DNA, 20 bp, Artificial Sequence
  Description of Artificial Sequence: Synthetic oligonucleotide
  Target: APOC3; (+) strand; PAM type: NRG; PAM sequence: AAG
ggggatactggccttgtgag

SEQ ID NO: 10274 - DNA, 20 bp, Artificial Sequence
  Description of Artificial Sequence: Synthetic oligonucleotide
  Target: APOC3; (+) strand; PAM type: NRG; PAM sequence: AAG
tactggccttgtgagaagaa

SEQ ID NO: 10275 - DNA, 20 bp, Artificial Sequence
  Description of Artificial Sequence: Synthetic oligonucleotide
  Target: APOC3; (+) strand; PAM type: NRG; PAM sequence: AGG
actggccttgtgagaagaaa

SEQ ID NO: 10276 - DNA, 20 bp, Artificial Sequence
  Description of Artificial Sequence: Synthetic oligonucleotide
  Target: APOC3; (+) strand; PAM type: NRG; PAM sequence: GGG
ctggccttgtgagaagaaaa

SEQ ID NO: 10277 - DNA, 20 bp, Artificial Sequence
  Description of Artificial Sequence: Synthetic oligonucleotide
  Target: APOC3; (+) strand; PAM type: NRG; PAM sequence: AAG
gccttgtgagaagaaaaggg

SEQ ID NO: 10278 - DNA, 20 bp, Artificial Sequence
  Description of Artificial Sequence: Synthetic oligonucleotide
  Target: APOC3; (+) strand; PAM type: NRG; PAM sequence: GAG
gaaaagggaagtgtctgttt

SEQ ID NO: 10279 - DNA, 20 bp, Artificial Sequence
  Description of Artificial Sequence: Synthetic oligonucleotide
  Target: APOC3; (+) strand; PAM type: NRG; PAM sequence: GAG
aaagggaagtgtctgtttga

SEQ ID NO: 10280 - DNA, 20 bp, Artificial Sequence
  Description of Artificial Sequence: Synthetic oligonucleotide
  Target: APOC3; (+) strand; PAM type: NRG; PAM sequence: AGG
aagggaagtgtctgtttgag

SEQ ID NO: 10281 - DNA, 20 bp, Artificial Sequence
  Description of Artificial Sequence: Synthetic oligonucleotide
  Target: APOC3; (+) strand; PAM type: NRG; PAM sequence: TAG
tgtttgagaggtttttgaat

SEQ ID NO: 10282 - DNA, 20 bp, Artificial Sequence
  Description of Artificial Sequence: Synthetic oligonucleotide
  Target: APOC3; (+) strand; PAM type: NRG; PAM sequence: AAG
gagaggtttttgaattagta

SEQ ID NO: 10283 - DNA, 20 bp, Artificial Sequence
  Description of Artificial Sequence: Synthetic oligonucleotide
  Target: APOC3; (+) strand; PAM type: NRG; PAM sequence: AGG
agaggtttttgaattagtaa

SEQ ID NO: 10284 - DNA, 20 bp, Artificial Sequence
  Description of Artificial Sequence: Synthetic oligonucleotide
  Target: APOC3; (+) strand; PAM type: NRG; PAM sequence: GAG
aggtttttgaattagtaaag

SEQ ID NO: 10285 - DNA, 20 bp, Artificial Sequence
  Description of Artificial Sequence: Synthetic oligonucleotide
  Target: APOC3; (+) strand; PAM type: NRG; PAM sequence: AGG
ggtttttgaattagtaaagg

SEQ ID NO: 10286 - DNA, 20 bp, Artificial Sequence
  Description of Artificial Sequence: Synthetic oligonucleotide
  Target: APOC3; (+) strand; PAM type: NRG; PAM sequence: CAG
tttgaattagtaaaggagga

SEQ ID NO: 10287 - DNA, 20 bp, Artificial Sequence
  Description of Artificial Sequence: Synthetic oligonucleotide
  Target: APOC3; (+) strand; PAM type: NRG; PAM sequence: AGG
ttgaattagtaaaggaggac

SEQ ID NO: 10288 - DNA, 20 bp, Artificial Sequence
  Description of Artificial Sequence: Synthetic oligonucleotide
  Target: APOC3; (+) strand; PAM type: NRG; PAM sequence: AAG
ggaggacaggcgcaaactcc

SEQ ID NO: 10289 - DNA, 20 bp, Artificial Sequence
  Description of Artificial Sequence: Synthetic oligonucleotide
  Target: APOC3; (+) strand; PAM type: NRG; PAM sequence: CGG
ccaagcgcttcacttgcacc

SEQ ID NO: 10290 - DNA, 20 bp, Artificial Sequence
  Description of Artificial Sequence: Synthetic oligonucleotide
  Target: APOC3; (+) strand; PAM type: NRG; PAM sequence: GGG
caagcgcttcacttgcaccc

SEQ ID NO: 10291 - DNA, 20 bp, Artificial Sequence
  Description of Artificial Sequence: Synthetic oligonucleotide
  Target: APOC3; (+) strand; PAM type: NRG; PAM sequence: CAG
ccgggaccaaaccccaatcc

SEQ ID NO: 10292 - DNA, 20 bp, Artificial Sequence
  Description of Artificial Sequence: Synthetic oligonucleotide
  Target: APOC3; (+) strand; PAM type: NRG; PAM sequence: TGG
ggaccaaaccccaatcccag

SEQ ID NO: 10293 - DNA, 20 bp, Artificial Sequence
  Description of Artificial Sequence: Synthetic oligonucleotide
  Target: APOC3; (+) strand; PAM type: NRG; PAM sequence: TGG
caaaccccaatcccagtggc

SEQ ID NO: 10294 - DNA, 20 bp, Artificial Sequence
  Description of Artificial Sequence: Synthetic oligonucleotide
  Target: APOC3; (+) strand; PAM type: NRG; PAM sequence: GAG
atcccagtggctggctccct

SEQ ID NO: 10295 - DNA, 20 bp, Artificial Sequence
  Description of Artificial Sequence: Synthetic oligonucleotide
  Target: APOC3; (+) strand; PAM type: NRG; PAM sequence: AGG
tcccagtggctggctccctg

SEQ ID NO: 10296 - DNA, 20 bp, Artificial Sequence
  Description of Artificial Sequence: Synthetic oligonucleotide
  Target: APOC3; (+) strand; PAM type: NRG; PAM sequence: CAG
gctccgtcccgccccgctga

SEQ ID NO: 10297 - DNA, 20 bp, Artificial Sequence
  Description of Artificial Sequence: Synthetic oligonucleotide
  Target: APOC3; (+) strand; PAM type: NRG; PAM sequence: CGG
ccgtcccgccccgctgacag

SEQ ID NO: 10298 - DNA, 20 bp, Artificial Sequence
  Description of Artificial Sequence: Synthetic oligonucleotide
  Target: APOC3; (+) strand; PAM type: NRG; PAM sequence: TGG
cccgccccgctgacagcggc

SEQ ID NO: 10299 - DNA, 20 bp, Artificial Sequence
  Description of Artificial Sequence: Synthetic oligonucleotide
  Target: APOC3; (+) strand; PAM type: NRG; PAM sequence: GGG
ccgccccgctgacagcggct

SEQ ID NO: 10300 - DNA, 20 bp, Artificial Sequence
  Description of Artificial Sequence: Synthetic oligonucleotide
  Target: APOC3; (+) strand; PAM type: NRG; PAM sequence: TGG
cccgctgacagcggctgggc

SEQ ID NO: 10301 - DNA, 20 bp, Artificial Sequence
  Description of Artificial Sequence: Synthetic oligonucleotide
  Target: APOC3; (+) strand; PAM type: NRG; PAM sequence: GAG
cgctgacagcggctgggctg

SEQ ID NO: 10302 - DNA, 20 bp, Artificial Sequence
  Description of Artificial Sequence: Synthetic oligonucleotide
  Target: APOC3; (+) strand; PAM type: NRG; PAM sequence: AAG
tgacagcggctgggctggag

SEQ ID NO: 10303 - DNA, 20 bp, Artificial Sequence
  Description of Artificial Sequence: Synthetic oligonucleotide
  Target: APOC3; (+) strand; PAM type: NRG; PAM sequence: AGG
gacagcggctgggctggaga

SEQ ID NO: 10304 - DNA, 20 bp, Artificial Sequence
  Description of Artificial Sequence: Synthetic oligonucleotide
  Target: APOC3; (+) strand; PAM type: NRG; PAM sequence: CGG
gggctggagaaggctctata

SEQ ID NO: 10305 - DNA, 20 bp, Artificial Sequence
  Description of Artificial Sequence: Synthetic oligonucleotide
  Target: APOC3; (+) strand; PAM type: NRG; PAM sequence: TGG
gctctatacggacacacctc

SEQ ID NO: 10306 - DNA, 20 bp, Artificial Sequence
  Description of Artificial Sequence: Synthetic oligonucleotide
  Target: APOC3; (+) strand; PAM type: NRG; PAM sequence: GGG
ctctatacggacacacctct

SEQ ID NO: 10307 - DNA, 20 bp, Artificial Sequence
  Description of Artificial Sequence: Synthetic oligonucleotide
  Target: APOC3; (+) strand; PAM type: NRG; PAM sequence: GGG
tctatacggacacacctctg

SEQ ID NO: 10308 - DNA, 20 bp, Artificial Sequence
  Description of Artificial Sequence: Synthetic oligonucleotide
  Target: APOC3; (+) strand; PAM type: NRG; PAM sequence: CGG
tacggacacacctctgggga

SEQ ID NO: 10309 - DNA, 20 bp, Artificial Sequence
  Description of Artificial Sequence: Synthetic oligonucleotide
  Target: APOC3; (+) strand; PAM type: NRG; PAM sequence: GGG
acggacacacctctggggac

SEQ ID NO: 10310 - DNA, 20 bp, Artificial Sequence
  Description of Artificial Sequence: Synthetic oligonucleotide
  Target: APOC3; (+) strand; PAM type: NRG; PAM sequence: GGG
cggacacacctctggggacg

SEQ ID NO: 10311 - DNA, 20 bp, Artificial Sequence
  Description of Artificial Sequence: Synthetic oligonucleotide
  Target: APOC3; (+) strand; PAM type: NRG; PAM sequence: CAG
gacggggaacccactgctcc

SEQ ID NO: 10312 - DNA, 20 bp, Artificial Sequence
  Description of Artificial Sequence: Synthetic oligonucleotide
  Target: APOC3; (+) strand; PAM type: NRG; PAM sequence: AAG
gaacccactgctcccagcta

SEQ ID NO: 10313 - DNA, 20 bp, Artificial Sequence
  Description of Artificial Sequence: Synthetic oligonucleotide
  Target: APOC3; (+) strand; PAM type: NRG; PAM sequence: TGG
gctaaagcaaccctgtttcc

SEQ ID NO: 10314 - DNA, 20 bp, Artificial Sequence
  Description of Artificial Sequence: Synthetic oligonucleotide
  Target: APOC3; (+) strand; PAM type: NRG; PAM sequence: CAG
ccctgtttcctggcccgcct

SEQ ID NO: 10315 - DNA, 20 bp, Artificial Sequence
  Description of Artificial Sequence: Synthetic oligonucleotide
  Target: APOC3; (+) strand; PAM type: NRG; PAM sequence: CAG
gtttcctggcccgcctcaga

SEQ ID NO: 10316 - DNA, 20 bp, Artificial Sequence
  Description of Artificial Sequence: Synthetic oligonucleotide
  Target: APOC3; (+) strand; PAM type: NRG; PAM sequence: AGG
tttcctggcccgcctcagac

SEQ ID NO: 10317 - DNA, 20 bp, Artificial Sequence
  Description of Artificial Sequence: Synthetic oligonucleotide
  Target: APOC3; (+) strand; PAM type: NRG; PAM sequence: GGG
ttcctggcccgcctcagaca

SEQ ID NO: 10318 - DNA, 20 bp, Artificial Sequence
  Description of Artificial Sequence: Synthetic oligonucleotide
  Target: APOC3; (+) strand; PAM type: NRG; PAM sequence: CAG
gcccgcctcagacagggctg

SEQ ID NO: 10319 - DNA, 20 bp, Artificial Sequence
  Description of Artificial Sequence: Synthetic oligonucleotide
  Target: APOC3; (+) strand; PAM type: NRG; PAM sequence: AGG
cccgcctcagacagggctgc

SEQ ID NO: 10320 - DNA, 20 bp, Artificial Sequence
  Description of Artificial Sequence: Synthetic oligonucleotide
  Target: APOC3; (+) strand; PAM type: NRG; PAM sequence: GAG
cagggctgcaggccttgttt

SEQ ID NO: 10321 - DNA, 20 bp, Artificial Sequence
  Description of Artificial Sequence: Synthetic oligonucleotide
  Target: APOC3; (+) strand; PAM type: NRG; PAM sequence: CAG
ggccttgtttgagccccttt

SEQ ID NO: 10322 - DNA, 20 bp, Artificial Sequence
  Description of Artificial Sequence: Synthetic oligonucleotide
  Target: APOC3; (+) strand; PAM type: NRG; PAM sequence: AGG
gccttgtttgagcccctttc

SEQ ID NO: 10323 - DNA, 20 bp, Artificial Sequence
  Description of Artificial Sequence: Synthetic oligonucleotide
  Target: APOC3; (+) strand; PAM type: NRG; PAM sequence: GGG
ccttgtttgagcccctttca

SEQ ID NO: 10324 - DNA, 20 bp, Artificial Sequence
  Description of Artificial Sequence: Synthetic oligonucleotide
  Target: APOC3; (+) strand; PAM type: NRG; PAM sequence: TGG
tgagcccctttcagggcacc

SEQ ID NO: 10325 - DNA, 20 bp, Artificial Sequence
  Description of Artificial Sequence: Synthetic oligonucleotide
  Target: APOC3; (+) strand; PAM type: NRG; PAM sequence: TGG
cctttcagggcacctggcct

SEQ ID NO: 10326 - DNA, 20 bp, Artificial Sequence
  Description of Artificial Sequence: Synthetic oligonucleotide
  Target: APOC3; (+) strand; PAM type: NRG; PAM sequence: TGG
acctggccttggattgtctg

SEQ ID NO: 10327 - DNA, 20 bp, Artificial Sequence
  Description of Artificial Sequence: Synthetic oligonucleotide
  Target: APOC3; (+) strand; PAM type: NRG; PAM sequence: TGG
ggattgtctgtggctttgcc

SEQ ID NO: 10328 - DNA, 20 bp, Artificial Sequence
  Description of Artificial Sequence: Synthetic oligonucleotide
  Target: APOC3; (+) strand; PAM type: NRG; PAM sequence: GAG
ctgtgacttcctttctactt

SEQ ID NO: 10329 - DNA, 20 bp, Artificial Sequence
  Description of Artificial Sequence: Synthetic oligonucleotide
  Target: APOC3; (+) strand; PAM type: NRG; PAM sequence: AAG
ctttctacttgagccttgct

SEQ ID NO: 10330 - DNA, 20 bp, Artificial Sequence
  Description of Artificial Sequence: Synthetic oligonucleotide
  Target: APOC3; (+) strand; PAM type: NRG; PAM sequence: AGG
tttctacttgagccttgcta

SEQ ID NO: 10331 - DNA, 20 bp, Artificial Sequence
  Description of Artificial Sequence: Synthetic oligonucleotide
  Target: APOC3; (+) strand; PAM type: NRG; PAM sequence: CAG
ctacttgagccttgctaagg

SEQ ID NO: 10332 - DNA, 20 bp, Artificial Sequence
  Description of Artificial Sequence: Synthetic oligonucleotide
  Target: APOC3; (+) strand; PAM type: NRG; PAM sequence: AAG
gactctactccctcactcgt

SEQ ID NO: 10333 - DNA, 20 bp, Artificial Sequence
  Description of Artificial Sequence: Synthetic oligonucleotide
  Target: APOC3; (+) strand; PAM type: NRG; PAM sequence: CAG
tctactccctcactcgtaag

SEQ ID NO: 10334 - DNA, 20 bp, Artificial Sequence
  Description of Artificial Sequence: Synthetic oligonucleotide
  Target: APOC3; (+) strand; PAM type: NRG; PAM sequence: CAG
ctccctcactcgtaagcagc

SEQ ID NO: 10335 - DNA, 20 bp, Artificial Sequence
  Description of Artificial Sequence: Synthetic oligonucleotide
  Target: APOC3; (+) strand; PAM type: NRG; PAM sequence: AGG
tccctcactcgtaagcagcc

SEQ ID NO: 10336 - DNA, 20 bp, Artificial Sequence
  Description of Artificial Sequence: Synthetic oligonucleotide
  Target: APOC3; (+) strand; PAM type: NRG; PAM sequence: CAG
ctcgtaagcagccaggcgtc

SEQ ID NO: 10337 - DNA, 20 bp, Artificial Sequence
  Description of Artificial Sequence: Synthetic oligonucleotide
  Target: APOC3; (+) strand; PAM type: NRG; PAM sequence: CAG
gtaagcagccaggcgtccag

SEQ ID NO: 10338 - DNA, 20 bp, Artificial Sequence
  Description of Artificial Sequence: Synthetic oligonucleotide
  Target: APOC3; (+) strand; PAM type: NRG; PAM sequence: AGG
taagcagccaggcgtccagc

SEQ ID NO: 10339 - DNA, 20 bp, Artificial Sequence
  Description of Artificial Sequence: Synthetic oligonucleotide
  Target: APOC3; (+) strand; PAM type: NRG; PAM sequence: TGG
aggtcctccaacgtcgatct

SEQ ID NO: 10340 - DNA, 20 bp, Artificial Sequence
  Description of Artificial Sequence: Synthetic oligonucleotide
  Target: APOC3; (+) strand; PAM type: NRG; PAM sequence: AAG
ccaacgtcgatcttggccct

SEQ ID NO: 10341 - DNA, 20 bp, Artificial Sequence
  Description of Artificial Sequence: Synthetic oligonucleotide
  Target: APOC3; (+) strand; PAM type: NRG; PAM sequence: CAG
gatcttggccctaagacgtc

SEQ ID NO: 10342 - DNA, 20 bp, Artificial Sequence
  Description of Artificial Sequence: Synthetic oligonucleotide
  Target: APOC3; (+) strand; PAM type: NRG; PAM sequence: TGG
tggccctaagacgtccagtc

SEQ ID NO: 10343 - DNA, 20 bp, Artificial Sequence
  Description of Artificial Sequence: Synthetic oligonucleotide
  Target: APOC3; (+) strand; PAM type: NRG; PAM sequence: GGG
ggccctaagacgtccagtct

SEQ ID NO: 10344 - DNA, 20 bp, Artificial Sequence
  Description of Artificial Sequence: Synthetic oligonucleotide
  Target: APOC3; (+) strand; PAM type: NRG; PAM sequence: CGG
taagacgtccagtctgggca

SEQ ID NO: 10345 - DNA, 20 bp, Artificial Sequence
  Description of Artificial Sequence: Synthetic oligonucleotide
  Target: APOC3; (+) strand; PAM type: NRG; PAM sequence: GAG
agacgtccagtctgggcacg

SEQ ID NO: 10346 - DNA, 20 bp, Artificial Sequence
  Description of Artificial Sequence: Synthetic oligonucleotide
  Target: APOC3; (+) strand; PAM type: NRG; PAM sequence: GAG
agtctgggcacggagttgtt

SEQ ID NO: 10347 - DNA, 20 bp, Artificial Sequence
  Description of Artificial Sequence: Synthetic oligonucleotide
  Target: APOC3; (+) strand; PAM type: NRG; PAM sequence: CGG
ggcacggagttgttgagatc

SEQ ID NO: 10348 - DNA, 20 bp, Artificial Sequence
  Description of Artificial Sequence: Synthetic oligonucleotide
  Target: APOC3; (+) strand; PAM type: NRG; PAM sequence: CAG
acggagttgttgagatccgg

SEQ ID NO: 10349 - DNA, 20 bp, Artificial Sequence
  Description of Artificial Sequence: Synthetic oligonucleotide
  Target: APOC3; (+) strand; PAM type: NRG; PAM sequence: AGG
cggagttgttgagatccggc

SEQ ID NO: 10350 - DNA, 20 bp, Artificial Sequence
  Description of Artificial Sequence: Synthetic oligonucleotide
  Target: APOC3; (+) strand; PAM type: NRG; PAM sequence: AAG
agttgttgagatccggcagg

SEQ ID NO: 10351 - DNA, 20 bp, Artificial Sequence
  Description of Artificial Sequence: Synthetic oligonucleotide
  Target: APOC3; (+) strand; PAM type: NRG; PAM sequence: CAG
ccggcaggaagtccctgctc

SEQ ID NO: 10352 - DNA, 20 bp, Artificial Sequence
  Description of Artificial Sequence: Synthetic oligonucleotide
  Target: APOC3; (+) strand; PAM type: NRG; PAM sequence: AGG
cggcaggaagtccctgctcc

SEQ ID NO: 10353 - DNA, 20 bp, Artificial Sequence
  Description of Artificial Sequence: Synthetic oligonucleotide
  Target: APOC3; (+) strand; PAM type: NRG; PAM sequence: GGG
ggcaggaagtccctgctcca

SEQ ID NO: 10354 - DNA, 20 bp, Artificial Sequence
  Description of Artificial Sequence: Synthetic oligonucleotide
  Target: APOC3; (+) strand; PAM type: NRG; PAM sequence: AAG
aagtccctgctccagggcca

SEQ ID NO: 10355 - DNA, 20 bp, Artificial Sequence
  Description of Artificial Sequence: Synthetic oligonucleotide
  Target: APOC3; (+) strand; PAM type: NRG; PAM sequence: AGG
agtccctgctccagggccaa

SEQ ID NO: 10356 - DNA, 20 bp, Artificial Sequence
  Description of Artificial Sequence: Synthetic oligonucleotide
  Target: APOC3; (+) strand; PAM type: NRG; PAM sequence: CGG
ccagggccaaaggccccacc

SEQ ID NO: 10357 - DNA, 20 bp, Artificial Sequence
  Description of Artificial Sequence: Synthetic oligonucleotide
  Target: APOC3; (+) strand; PAM type: NRG; PAM sequence: GGG
cagggccaaaggccccaccc

SEQ ID NO: 10358 - DNA, 20 bp, Artificial Sequence
  Description of Artificial Sequence: Synthetic oligonucleotide
  Target: APOC3; (+) strand; PAM type: NRG; PAM sequence: CGG
aggccccacccgggctcccc

SEQ ID NO: 10359 - DNA, 20 bp, Artificial Sequence
  Description of Artificial Sequence: Synthetic oligonucleotide
  Target: APOC3; (+) strand; PAM type: NRG; PAM sequence: AAG
acccccctctattctcccaa

SEQ ID NO: 10360 - DNA, 20 bp, Artificial Sequence
  Description of Artificial Sequence: Synthetic oligonucleotide
  Target: APOC3; (+) strand; PAM type: NRG; PAM sequence: AAG
ccctctattctcccaaaaga

SEQ ID NO: 10361 - DNA, 20 bp, Artificial Sequence
  Description of Artificial Sequence: Synthetic oligonucleotide
  Target: APOC3; (+) strand; PAM type: NRG; PAM sequence: AAG
tctattctcccaaaagaaag

SEQ ID NO: 10362 - DNA, 20 bp, Artificial Sequence
  Description of Artificial Sequence: Synthetic oligonucleotide
  Target: APOC3; (+) strand; PAM type: NRG; PAM sequence: TGG
aaagaagctgcttcccactt

SEQ ID NO: 10363 - DNA, 20 bp, Artificial Sequence
  Description of Artificial Sequence: Synthetic oligonucleotide
  Target: APOC3; (+) strand; PAM type: NRG; PAM sequence: GAG
actttggaaacgtttattct

SEQ ID NO: 10364 - DNA, 20 bp, Artificial Sequence
  Description of Artificial Sequence: Synthetic oligonucleotide
  Target: APOC3; (+) strand; PAM type: NRG; PAM sequence: CGG
gaaacgtttattctgagcac

SEQ ID NO: 10365 - DNA, 20 bp, Artificial Sequence
  Description of Artificial Sequence: Synthetic oligonucleotide
  Target: APOC3; (+) strand; PAM type: NRG; PAM sequence: GGG
aaacgtttattctgagcacc

SEQ ID NO: 10366 - DNA, 20 bp, Artificial Sequence
  Description of Artificial Sequence: Synthetic oligonucleotide
  Target: APOC3; (+) strand; PAM type: NRG; PAM sequence: AAG
cgtttattctgagcaccggg

SEQ ID NO: 10367 - DNA, 20 bp, Artificial Sequence
  Description of Artificial Sequence: Synthetic oligonucleotide
  Target: APOC3; (+) strand; PAM type: NRG; PAM sequence: AGG
gtttattctgagcaccggga

SEQ ID NO: 10368 - DNA, 20 bp, Artificial Sequence
  Description of Artificial Sequence: Synthetic oligonucleotide
  Target: APOC3; (+) strand; PAM type: NRG; PAM sequence: GGG
tttattctgagcaccgggaa

SEQ ID NO: 10369 - DNA, 20 bp, Artificial Sequence
  Description of Artificial Sequence: Synthetic oligonucleotide
  Target: APOC3; (+) strand; PAM type: NRG; PAM sequence: GGG
ttattctgagcaccgggaag

SEQ ID NO: 10370 - DNA, 20 bp, Artificial Sequence
  Description of Artificial Sequence: Synthetic oligonucleotide
  Target: APOC3; (+) strand; PAM type: NRG; PAM sequence: GGG
tattctgagcaccgggaagg

SEQ ID NO: 10371 - DNA, 20 bp, Artificial Sequence
  Description of Artificial Sequence: Synthetic oligonucleotide
  Target: APOC3; (+) strand; PAM type: NRG; PAM sequence: GGG
attctgagcaccgggaaggg

SEQ ID NO: 10372 - DNA, 20 bp, Artificial Sequence
  Description of Artificial Sequence: Synthetic oligonucleotide
  Target: APOC3; (+) strand; PAM type: NRG; PAM sequence: CGG
ctgagcaccgggaagggggg

SEQ ID NO: 10373 - DNA, 20 bp, Artificial Sequence
  Description of Artificial Sequence: Synthetic oligonucleotide
  Target: APOC3; (+) strand; PAM type: NRG; PAM sequence: CGG
agcaccgggaaggggggcgg

SEQ ID NO: 10374 - DNA, 20 bp, Artificial Sequence
  Description of Artificial Sequence: Synthetic oligonucleotide
  Target: APOC3; (+) strand; PAM type: NRG; PAM sequence: CGG
accgggaaggggggcggcgg

SEQ ID NO: 10375 - DNA, 20 bp, Artificial Sequence
  Description of Artificial Sequence: Synthetic oligonucleotide
  Target: APOC3; (+) strand; PAM type: NRG; PAM sequence: GGG
ccgggaaggggggcggcggc

SEQ ID NO: 10376 - DNA, 20 bp, Artificial Sequence
  Description of Artificial Sequence: Synthetic oligonucleotide
  Target: APOC3; (+) strand; PAM type: NRG; PAM sequence: TGG
ggcggcggcgggcgcctcac

SEQ ID NO: 10377 - DNA, 20 bp, Artificial Sequence
  Description of Artificial Sequence: Synthetic oligonucleotide
  Target: APOC3; (+) strand; PAM type: NRG; PAM sequence: GGG
gcggcggcgggcgcctcact

SEQ ID NO: 10378 - DNA, 20 bp, Artificial Sequence
  Description of Artificial Sequence: Synthetic oligonucleotide
  Target: APOC3; (+) strand; PAM type: NRG; PAM sequence: GAG
cgggcgcctcactgggtgtt

SEQ ID NO: 10379 - DNA, 20 bp, Artificial Sequence
  Description of Artificial Sequence: Synthetic oligonucleotide
  Target: APOC3; (+) strand; PAM type: NRG; PAM sequence: TAG
tcactgggtgttgagcttct

SEQ ID NO: 10380 - DNA, 20 bp, Artificial Sequence
  Description of Artificial Sequence: Synthetic oligonucleotide
  Target: APOC3; (+) strand; PAM type: NRG; PAM sequence: GAG
agcttcttagtgtactcctc

SEQ ID NO: 10381 - DNA, 20 bp, Artificial Sequence
  Description of Artificial Sequence: Synthetic oligonucleotide
  Target: APOC3; (+) strand; PAM type: NRG; PAM sequence: GAG
cttcttagtgtactcctcga

SEQ ID NO: 10382 - DNA, 20 bp, Artificial Sequence
  Description of Artificial Sequence: Synthetic oligonucleotide
  Target: APOC3; (+) strand; PAM type: NRG; PAM sequence: CAG
gtgtactcctcgagagcgct

SEQ ID NO: 10383 - DNA, 20 bp, Artificial Sequence
  Description of Artificial Sequence: Synthetic oligonucleotide
  Target: APOC3; (+) strand; PAM type: NRG; PAM sequence: AGG
tgtactcctcgagagcgctc

SEQ ID NO: 10384 - DNA, 20 bp, Artificial Sequence
  Description of Artificial Sequence: Synthetic oligonucleotide
  Target: APOC3; (+) strand; PAM type: NRG; PAM sequence: AAG
actcctcgagagcgctcagg

SEQ ID NO: 10385 - DNA, 20 bp, Artificial Sequence
  Description of Artificial Sequence: Synthetic oligonucleotide
  Target: APOC3; (+) strand; PAM type: NRG; PAM sequence: AAG
cgctcaggaagctgaccttg

SEQ ID NO: 10386 - DNA, 20 bp, Artificial Sequence
  Description of Artificial Sequence: Synthetic oligonucleotide
  Target: APOC3; (+) strand; PAM type: NRG; PAM sequence: CAG
aagctgaccttgaagctctc

SEQ ID NO: 10387 - DNA, 20 bp, Artificial Sequence
  Description of Artificial Sequence: Synthetic oligonucleotide
  Target: APOC3; (+) strand; PAM type: NRG; PAM sequence: CGG
gaccttgaagctctccagca

SEQ ID NO: 10388 - DNA, 20 bp, Artificial Sequence
  Description of Artificial Sequence: Synthetic oligonucleotide
  Target: APOC3; (+) strand; PAM type: NRG; PAM sequence: GGG
accttgaagctctccagcac

SEQ ID NO: 10389 - DNA, 20 bp, Artificial Sequence
  Description of Artificial Sequence: Synthetic oligonucleotide
  Target: APOC3; (+) strand; PAM type: NRG; PAM sequence: CAG
ttgaagctctccagcacggg

SEQ ID NO: 10390 - DNA, 20 bp, Artificial Sequence
  Description of Artificial Sequence: Synthetic oligonucleotide
  Target: APOC3; (+) strand; PAM type: NRG; PAM sequence: CAG
aagctctccagcacgggcag

SEQ ID NO: 10391 - DNA, 20 bp, Artificial Sequence
  Description of Artificial Sequence: Synthetic oligonucleotide
  Target: APOC3; (+) strand; PAM type: NRG; PAM sequence: AGG
agctctccagcacgggcagc

SEQ ID NO: 10392 - DNA, 20 bp, Artificial Sequence
  Description of Artificial Sequence: Synthetic oligonucleotide
  Target: APOC3; (+) strand; PAM type: NRG; PAM sequence: TGG
ccagcacgggcagcaggcct

SEQ ID NO: 10393 - DNA, 20 bp, Artificial Sequence
  Description of Artificial Sequence: Synthetic oligonucleotide
  Target: APOC3; (+) strand; PAM type: NRG; PAM sequence: CGG
gcacgggcagcaggccttgg

SEQ ID NO: 10394 - DNA, 20 bp, Artificial Sequence
  Description of Artificial Sequence: Synthetic oligonucleotide
  Target: APOC3; (+) strand; PAM type: NRG; PAM sequence: GAG
acgggcagcaggccttggcg

SEQ ID NO: 10395 - DNA, 20 bp, Artificial Sequence
  Description of Artificial Sequence: Synthetic oligonucleotide
  Target: APOC3; (+) strand; PAM type: NRG; PAM sequence: AGG
cgggcagcaggccttggcgg

SEQ ID NO: 10396 - DNA, 20 bp, Artificial Sequence
  Description of Artificial Sequence: Synthetic oligonucleotide
  Target: APOC3; (+) strand; PAM type: NRG; PAM sequence: GAG
aggccttggcggaggtcctc

SEQ ID NO: 10397 - DNA, 20 bp, Artificial Sequence
  Description of Artificial Sequence: Synthetic oligonucleotide
  Target: APOC3; (+) strand; PAM type: NRG; PAM sequence: CGG
ttggcggaggtcctcgagcg

SEQ ID NO: 10398 - DNA, 20 bp, Artificial Sequence
  Description of Artificial Sequence: Synthetic oligonucleotide
  Target: APOC3; (+) strand; PAM type: NRG; PAM sequence: GGG
tggcggaggtcctcgagcgc

SEQ ID NO: 10399 - DNA, 20 bp, Artificial Sequence
  Description of Artificial Sequence: Synthetic oligonucleotide
  Target: APOC3; (+) strand; PAM type: NRG; PAM sequence: TGG
gaggtcctcgagcgcgggct

SEQ ID NO: 10400 - DNA, 20 bp, Artificial Sequence
  Description of Artificial Sequence: Synthetic oligonucleotide
  Target: APOC3; (+) strand; PAM type: NRG; PAM sequence: GAG
gcgggcttggccttctcgct

SEQ ID NO: 10401 - DNA, 20 bp, Artificial Sequence
  Description of Artificial Sequence: Synthetic oligonucleotide
  Target: APOC3; (+) strand; PAM type: NRG; PAM sequence: CAG
gccttctcgctgagcgtgct

SEQ ID NO: 10402 - DNA, 20 bp, Artificial Sequence
  Description of Artificial Sequence: Synthetic oligonucleotide
  Target: APOC3; (+) strand; PAM type: NRG; PAM sequence: CGG
gctgagcgtgctcagatgct

SEQ ID NO: 10403 - DNA, 20 bp, Artificial Sequence
  Description of Artificial Sequence: Synthetic oligonucleotide
  Target: APOC3; (+) strand; PAM type: NRG; PAM sequence: TGG
gagcgtgctcagatgctcgg

SEQ ID NO: 10404 - DNA, 20 bp, Artificial Sequence
  Description of Artificial Sequence: Synthetic oligonucleotide
  Target: APOC3; (+) strand; PAM type: NRG; PAM sequence: TGG
gctcagatgctcggtggcct

SEQ ID NO: 10405 - DNA, 20 bp, Artificial Sequence
  Description of Artificial Sequence: Synthetic oligonucleotide
  Target: APOC3; (+) strand; PAM type: NRG; PAM sequence: TGG
gatgctcggtggccttggcg

SEQ ID NO: 10406 - DNA, 20 bp, Artificial Sequence
  Description of Artificial Sequence: Synthetic oligonucleotide
  Target: APOC3; (+) strand; PAM type: NRG; PAM sequence: CGG
ggtggccttggcgtggtact

SEQ ID NO: 10407 - DNA, 20 bp, Artificial Sequence
  Description of Artificial Sequence: Synthetic oligonucleotide
  Target: APOC3; (+) strand; PAM type: NRG; PAM sequence: CAG
gccttggcgtggtactcggc

SEQ ID NO: 10408 - DNA, 20 bp, Artificial Sequence
  Description of Artificial Sequence: Synthetic oligonucleotide
  Target: APOC3; (+) strand; PAM type: NRG; PAM sequence: TGG
ggcgtggtactcggccagtc

SEQ ID NO: 10409 - DNA, 20 bp, Artificial Sequence
  Description of Artificial Sequence: Synthetic oligonucleotide
  Target: APOC3; (+) strand; PAM type: NRG; PAM sequence: GAG
ctggcgccgccgttctcctt

SEQ ID NO: 10410 - DNA, 20 bp, Artificial Sequence
  Description of Artificial Sequence: Synthetic oligonucleotide
  Target: APOC3; (+) strand; PAM type: NRG; PAM sequence: GAG
ggcgccgccgttctccttga

SEQ ID NO: 10411 - DNA, 20 bp, Artificial Sequence
  Description of Artificial Sequence: Synthetic oligonucleotide
  Target: APOC3; (+) strand; PAM type: NRG; PAM sequence: AAG
ccgttctccttgagagcctc

SEQ ID NO: 10412 - DNA, 20 bp, Artificial Sequence
  Description of Artificial Sequence: Synthetic oligonucleotide
  Target: APOC3; (+) strand; PAM type: NRG; PAM sequence: AGG
cgttctccttgagagcctca

SEQ ID NO: 10413 - DNA, 20 bp, Artificial Sequence
  Description of Artificial Sequence: Synthetic oligonucleotide
  Target: APOC3; (+) strand; PAM type: NRG; PAM sequence: CGG
cttgagagcctcaaggcgcg

SEQ ID NO: 10414 - DNA, 20 bp, Artificial Sequence
  Description of Artificial Sequence: Synthetic oligonucleotide
  Target: APOC3; (+) strand; PAM type: NRG; PAM sequence: AAG
gagcctcaaggcgcgcggcc

SEQ ID NO: 10415 - DNA, 20 bp, Artificial Sequence
  Description of Artificial Sequence: Synthetic oligonucleotide
  Target: APOC3; (+) strand; PAM type: NRG; PAM sequence: TGG
caaggcgcgcggccaagcgc

SEQ ID NO: 10416 - DNA, 20 bp, Artificial Sequence
  Description of Artificial Sequence: Synthetic oligonucleotide
  Target: APOC3; (+) strand; PAM type: NRG; PAM sequence: CAG
cgcgcggccaagcgctggcg

SEQ ID NO: 10417 - DNA, 20 bp, Artificial Sequence
  Description of Artificial Sequence: Synthetic oligonucleotide
  Target: APOC3; (+) strand; PAM type: NRG; PAM sequence: TAG
gctggcgcagctcgtcgctg

SEQ ID NO: 10418 - DNA, 20 bp, Artificial Sequence
  Description of Artificial Sequence: Synthetic oligonucleotide
  Target: APOC3; (+) strand; PAM type: NRG; PAM sequence: AGG
ctggcgcagctcgtcgctgt

SEQ ID NO: 10419 - DNA, 20 bp, Artificial Sequence
  Description of Artificial Sequence: Synthetic oligonucleotide
  Target: APOC3; (+) strand; PAM type: NRG; PAM sequence: GGG
tggcgcagctcgtcgctgta

SEQ ID NO: 10420 - DNA, 20 bp, Artificial Sequence
  Description of Artificial Sequence: Synthetic oligonucleotide
  Target: APOC3; (+) strand; PAM type: NRG; PAM sequence: GGG
ggcgcagctcgtcgctgtag

SEQ ID NO: 10421 - DNA, 20 bp, Artificial Sequence
  Description of Artificial Sequence: Synthetic oligonucleotide
  Target: APOC3; (+) strand; PAM type: NRG; PAM sequence: GGG
gcgcagctcgtcgctgtagg

SEQ ID NO: 10422 - DNA, 20 bp, Artificial Sequence
  Description of Artificial Sequence: Synthetic oligonucleotide
  Target: APOC3; (+) strand; PAM type: NRG; PAM sequence: CAG
agctcgtcgctgtagggggc

SEQ ID NO: 10423 - DNA, 20 bp, Artificial Sequence
  Description of Artificial Sequence: Synthetic oligonucleotide
  Target: APOC3; (+) strand; PAM type: NRG; PAM sequence: CAG
tagggggccagatgcgtgcg

SEQ ID NO: 10424 - DNA, 20 bp, Artificial Sequence
  Description of Artificial Sequence: Synthetic oligonucleotide
  Target: APOC3; (+) strand; PAM type: NRG; PAM sequence: TGG
gcgtgcgcagcgcgtccaca

SEQ ID NO: 10425 - DNA, 20 bp, Artificial Sequence
  Description of Artificial Sequence: Synthetic oligonucleotide
  Target: APOC3; (+) strand; PAM type: NRG; PAM sequence: GGG
cgtgcgcagcgcgtccacat

SEQ ID NO: 10426 - DNA, 20 bp, Artificial Sequence
  Description of Artificial Sequence: Synthetic oligonucleotide
  Target: APOC3; (+) strand; PAM type: NRG; PAM sequence: CGG
cgtccacatgggcgcgcgcg

SEQ ID NO: 10427 - DNA, 20 bp, Artificial Sequence
  Description of Artificial Sequence: Synthetic oligonucleotide
  Target: APOC3; (+) strand; PAM type: NRG; PAM sequence: CAG
cggtcgcgcatctcctcgcc

SEQ ID NO: 10428 - DNA, 20 bp, Artificial Sequence
  Description of Artificial Sequence: Synthetic oligonucleotide
  Target: APOC3; (+) strand; PAM type: NRG; PAM sequence: TGG
tcgcgcatctcctcgcccag

SEQ ID NO: 10429 - DNA, 20 bp, Artificial Sequence
  Description of Artificial Sequence: Synthetic oligonucleotide
  Target: APOC3; (+) strand; PAM type: NRG; PAM sequence: GGG
cgcgcatctcctcgcccagt

SEQ ID NO: 10430 - DNA, 20 bp, Artificial Sequence
  Description of Artificial Sequence: Synthetic oligonucleotide
  Target: APOC3; (+) strand; PAM type: NRG; PAM sequence: CAG
atctcctcgcccagtgggct

SEQ ID NO: 10431 - DNA, 20 bp, Artificial Sequence
  Description of Artificial Sequence: Synthetic oligonucleotide
  Target: APOC3; (+) strand; PAM type: NRG; PAM sequence: CAG
agtgggctcagcttctcttg

SEQ ID NO: 10432 - DNA, 20 bp, Artificial Sequence
  Description of Artificial Sequence: Synthetic oligonucleotide
  Target: APOC3; (+) strand; PAM type: NRG; PAM sequence: CAG
agcttctcttgcagctcgtg

SEQ ID NO: 10433 - DNA, 20 bp, Artificial Sequence
  Description of Artificial Sequence: Synthetic oligonucleotide
  Target: APOC3; (+) strand; PAM type: NRG; PAM sequence: TGG
cttgcagctcgtgcagcttc

SEQ ID NO: 10434 - DNA, 20 bp, Artificial Sequence
  Description of Artificial Sequence: Synthetic oligonucleotide
  Target: APOC3; (+) strand; PAM type: NRG; PAM sequence: TGG
gcttctggcgcgcgccctct

SEQ ID NO: 10435 - DNA, 20 bp, Artificial Sequence
  Description of Artificial Sequence: Synthetic oligonucleotide
  Target: APOC3; (+) strand; PAM type: NRG; PAM sequence: GAG
ttctggcgcgcgccctcttg

SEQ ID NO: 10436 - DNA, 20 bp, Artificial Sequence
  Description of Artificial Sequence: Synthetic oligonucleotide
  Target: APOC3; (+) strand; PAM type: NRG; PAM sequence: CAG
ccctcttggagctctgcgcg

SEQ ID NO: 10437 - DNA, 20 bp, Artificial Sequence
  Description of Artificial Sequence: Synthetic oligonucleotide
  Target: APOC3; (+) strand; PAM type: NRG; PAM sequence: CGG
tcttggagctctgcgcgcag

SEQ ID NO: 10438 - DNA, 20 bp, Artificial Sequence
  Description of Artificial Sequence: Synthetic oligonucleotide
  Target: APOC3; (+) strand; PAM type: NRG; PAM sequence: TGG
cgcgcagcggctccaccttc

SEQ ID NO: 10439 - DNA, 20 bp, Artificial Sequence
  Description of Artificial Sequence: Synthetic oligonucleotide
  Target: APOC3; (+) strand; PAM type: NRG; PAM sequence: CGG
gcagcggctccaccttctgg

SEQ ID NO: 10440 - DNA, 20 bp, Artificial Sequence
  Description of Artificial Sequence: Synthetic oligonucleotide
  Target: APOC3; (+) strand; PAM type: NRG; PAM sequence: TAG
gcggctccaccttctggcgg

SEQ ID NO: 10441 - DNA, 20 bp, Artificial Sequence
  Description of Artificial Sequence: Synthetic oligonucleotide
  Target: APOC3; (+) strand; PAM type: NRG; PAM sequence: GAG
ggctccaccttctggcggta

SEQ ID NO: 10442 - DNA, 20 bp, Artificial Sequence
  Description of Artificial Sequence: Synthetic oligonucleotide
  Target: APOC3; (+) strand; PAM type: NRG; PAM sequence: TGG
tctcctcctgccacttcttc

SEQ ID NO: 10443 - DNA, 20 bp, Artificial Sequence
  Description of Artificial Sequence: Synthetic oligonucleotide
  Target: APOC3; (+) strand; PAM type: NRG; PAM sequence: AAG
cctcctgccacttcttctgg

SEQ ID NO: 10444 - DNA, 20 bp, Artificial Sequence
  Description of Artificial Sequence: Synthetic oligonucleotide
  Target: APOC3; (+) strand; PAM type: NRG; PAM sequence: CAG
cacttcttctggaagtcgtc

SEQ ID NO: 10445 - DNA, 20 bp, Artificial Sequence
  Description of Artificial Sequence: Synthetic oligonucleotide
  Target: APOC3; (+) strand; PAM type: NRG; PAM sequence: AGG
acttcttctggaagtcgtcc

SEQ ID NO: 10446 - DNA, 20 bp, Artificial Sequence
  Description of Artificial Sequence: Synthetic oligonucleotide
  Target: APOC3; (+) strand; PAM type: NRG; PAM sequence: TAG
tcttctggaagtcgtccagg

SEQ ID NO: 10447 - DNA, 20 bp, Artificial Sequence
  Description of Artificial Sequence: Synthetic oligonucleotide
  Target: APOC3; (+) strand; PAM type: NRG; PAM sequence: AGG
cttctggaagtcgtccaggt

SEQ ID NO: 10448 - DNA, 20 bp, Artificial Sequence
  Description of Artificial Sequence: Synthetic oligonucleotide
  Target: APOC3; (+) strand; PAM type: NRG; PAM sequence: GGG
ttctggaagtcgtccaggta

SEQ ID NO: 10449 - DNA, 20 bp, Artificial Sequence
  Description of Artificial Sequence: Synthetic oligonucleotide
  Target: APOC3; (+) strand; PAM type: NRG; PAM sequence: TGG
gtccaggtagggctgcacct

SEQ ID NO: 10450 - DNA, 20 bp, Artificial Sequence
  Description of Artificial Sequence: Synthetic oligonucleotide
  Target: APOC3; (+) strand; PAM type: NRG; PAM sequence: CAG
accttggccttcacctcctc

SEQ ID NO: 10451 - DNA, 20 bp, Artificial Sequence
  Description of Artificial Sequence: Synthetic oligonucleotide
  Target: APOC3; (+) strand; PAM type: NRG; PAM sequence: CAG
tccttgctcatctcctgcct

SEQ ID NO: 10452 - DNA, 20 bp, Artificial Sequence
  Description of Artificial Sequence: Synthetic oligonucleotide
  Target: APOC3; (+) strand; PAM type: NRG; PAM sequence: AGG
ccttgctcatctcctgcctc

SEQ ID NO: 10453 - DNA, 20 bp, Artificial Sequence
  Description of Artificial Sequence: Synthetic oligonucleotide
  Target: APOC3; (+) strand; PAM type: NRG; PAM sequence: CAG
aggccctctgtctccttttc

SEQ ID NO: 10454 - DNA, 20 bp, Artificial Sequence
  Description of Artificial Sequence: Synthetic oligonucleotide
  Target: APOC3; (+) strand; PAM type: NRG; PAM sequence: AGG
ggccctctgtctccttttcc

SEQ ID NO: 10455 - DNA, 20 bp, Artificial Sequence
  Description of Artificial Sequence: Synthetic oligonucleotide
  Target: APOC3; (+) strand; PAM type: NRG; PAM sequence: CAG
tctccttttccaggttatcc

SEQ ID NO: 10456 - DNA, 20 bp, Artificial Sequence
  Description of Artificial Sequence: Synthetic oligonucleotide
  Target: APOC3; (+) strand; PAM type: NRG; PAM sequence: TGG
ccaggttatcccagaactcc

SEQ ID NO: 10457 - DNA, 20 bp, Artificial Sequence
  Description of Artificial Sequence: Synthetic oligonucleotide
  Target: APOC3; (+) strand; PAM type: NRG; PAM sequence: GGG
caggttatcccagaactcct

SEQ ID NO: 10458 - DNA, 20 bp, Artificial Sequence
  Description of Artificial Sequence: Synthetic oligonucleotide
  Target: APOC3; (+) strand; PAM type: NRG; PAM sequence: CAG
atcccagaactcctgggtca

SEQ ID NO: 10459 - DNA, 20 bp, Artificial Sequence
  Description of Artificial Sequence: Synthetic oligonucleotide
  Target: APOC3; (+) strand; PAM type: NRG; PAM sequence: AGG
tcccagaactcctgggtcac

SEQ ID NO: 10460 - DNA, 20 bp, Artificial Sequence
  Description of Artificial Sequence: Synthetic oligonucleotide
  Target: APOC3; (+) strand; PAM type: NRG; PAM sequence: GGG
cccagaactcctgggtcaca

SEQ ID NO: 10461 - DNA, 20 bp, Artificial Sequence
  Description of Artificial Sequence: Synthetic oligonucleotide
  Target: APOC3; (+) strand; PAM type: NRG; PAM sequence: GAG
aactcctgggtcacagggcc

SEQ ID NO: 10462 - DNA, 20 bp, Artificial Sequence
  Description of Artificial Sequence: Synthetic oligonucleotide
  Target: APOC3; (+) strand; PAM type: NRG; PAM sequence: CAG
acagggccgagctgttcgcg

SEQ ID NO: 10463 - DNA, 20 bp, Artificial Sequence
  Description of Artificial Sequence: Synthetic oligonucleotide
  Target: APOC3; (+) strand; PAM type: NRG; PAM sequence: AAG
gctgttcgcgcagcttgctg

SEQ ID NO: 10464 - DNA, 20 bp, Artificial Sequence
  Description of Artificial Sequence: Synthetic oligonucleotide
  Target: APOC3; (+) strand; PAM type: NRG; PAM sequence: AGG
ctgttcgcgcagcttgctga

SEQ ID NO: 10465 - DNA, 20 bp, Artificial Sequence
  Description of Artificial Sequence: Synthetic oligonucleotide
  Target: APOC3; (+) strand; PAM type: NRG; PAM sequence: TGG
ttcgcgcagcttgctgaagg

SEQ ID NO: 10466 - DNA, 20 bp, Artificial Sequence
  Description of Artificial Sequence: Synthetic oligonucleotide
  Target: APOC3; (+) strand; PAM type: NRG; PAM sequence: GAG
cgcgcagcttgctgaaggtg

SEQ ID NO: 10467 - DNA, 20 bp, Artificial Sequence
  Description of Artificial Sequence: Synthetic oligonucleotide
  Target: APOC3; (+) strand; PAM type: NRG; PAM sequence: AGG
gcgcagcttgctgaaggtgg

SEQ ID NO: 10468 - DNA, 20 bp, Artificial Sequence
  Description of Artificial Sequence: Synthetic oligonucleotide
  Target: APOC3; (+) strand; PAM type: NRG; PAM sequence: CAG
aggtggaggtcacgctgtcc

SEQ ID NO: 10469 - DNA, 20 bp, Artificial Sequence
  Description of Artificial Sequence: Synthetic oligonucleotide
  Target: APOC3; (+) strand; PAM type: NRG; PAM sequence: AAG
gtcacgctgtcccagttgtc

SEQ ID NO: 10470 - DNA, 20 bp, Artificial Sequence
  Description of Artificial Sequence: Synthetic oligonucleotide
  Target: APOC3; (+) strand; PAM type: NRG; PAM sequence: AGG
tcacgctgtcccagttgtca

SEQ ID NO: 10471 - DNA, 20 bp, Artificial Sequence
  Description of Artificial Sequence: Synthetic oligonucleotide
  Target: APOC3; (+) strand; PAM type: NRG; PAM sequence: GAG
acgctgtcccagttgtcaag

SEQ ID NO: 10472 - DNA, 20 bp, Artificial Sequence
  Description of Artificial Sequence: Synthetic oligonucleotide
  Target: APOC3; (+) strand; PAM type: NRG; PAM sequence: TAG
tcccagttgtcaaggagctt

SEQ ID NO: 10473 - DNA, 20 bp, Artificial Sequence
  Description of Artificial Sequence: Synthetic oligonucleotide
  Target: APOC3; (+) strand; PAM type: NRG; PAM sequence: AGG
cccagttgtcaaggagcttt

SEQ ID NO: 10474 - DNA, 20 bp, Artificial Sequence
  Description of Artificial Sequence: Synthetic oligonucleotide
  Target: APOC3; (+) strand; PAM type: NRG; PAM sequence: TGG
gttgtcaaggagctttaggc

SEQ ID NO: 10475 - DNA, 20 bp, Artificial Sequence
  Description of Artificial Sequence: Synthetic oligonucleotide
  Target: APOC3; (+) strand; PAM type: NRG; PAM sequence: GAG
tgtcaaggagctttaggctg

SEQ ID NO: 10476 - DNA, 20 bp, Artificial Sequence
  Description of Artificial Sequence: Synthetic oligonucleotide
  Target: APOC3; (+) strand; PAM type: NRG; PAM sequence: AGG
gtcaaggagctttaggctgg

SEQ ID NO: 10477 - DNA, 20 bp, Artificial Sequence
  Description of Artificial Sequence: Synthetic oligonucleotide
  Target: APOC3; (+) strand; PAM type: NRG; PAM sequence: GGG
tcaaggagctttaggctgga

SEQ ID NO: 10478 - DNA, 20 bp, Artificial Sequence
  Description of Artificial Sequence: Synthetic oligonucleotide
  Target: APOC3; (+) strand; PAM type: NRG; PAM sequence: GAG
ggagctttaggctggagggt

SEQ ID NO: 10479 - DNA, 20 bp, Artificial Sequence
  Description of Artificial Sequence: Synthetic oligonucleotide
  Target: APOC3; (+) strand; PAM type: NRG; PAM sequence: CAG
ctttaggctggagggtgaga

SEQ ID NO: 10480 - DNA, 20 bp, Artificial Sequence
  Description of Artificial Sequence: Synthetic oligonucleotide
  Target: APOC3; (+) strand; PAM type: NRG; PAM sequence: AAG
taggctggagggtgagacag

SEQ ID NO: 10481 - DNA, 20 bp, Artificial Sequence
  Description of Artificial Sequence: Synthetic oligonucleotide
  Target: APOC3; (+) strand; PAM type: NRG; PAM sequence: AGG
aggctggagggtgagacaga

SEQ ID NO: 10482 - DNA, 20 bp, Artificial Sequence
  Description of Artificial Sequence: Synthetic oligonucleotide
  Target: APOC3; (+) strand; PAM type: NRG; PAM sequence: GGG
ggctggagggtgagacagaa

SEQ ID NO: 10483 - DNA, 20 bp, Artificial Sequence
  Description of Artificial Sequence: Synthetic oligonucleotide
  Target: APOC3; (+) strand; PAM type: NRG; PAM sequence: GAG
gagggtgagacagaagggtt

SEQ ID NO: 10484 - DNA, 20 bp, Artificial Sequence
  Description of Artificial Sequence: Synthetic oligonucleotide
  Target: APOC3; (+) strand; PAM type: NRG; PAM sequence: AGG
agggtgagacagaagggttg

SEQ ID NO: 10485 - DNA, 20 bp, Artificial Sequence
  Description of Artificial Sequence: Synthetic oligonucleotide
  Target: APOC3; (+) strand; PAM type: NRG; PAM sequence: GGG
gggtgagacagaagggttga

SEQ ID NO: 10486 - DNA, 20 bp, Artificial Sequence
  Description of Artificial Sequence: Synthetic oligonucleotide
  Target: APOC3; (+) strand; PAM type: NRG; PAM sequence: TGG
gagacagaagggttgagggc

SEQ ID NO: 10487 - DNA, 20 bp, Artificial Sequence
  Description of Artificial Sequence: Synthetic oligonucleotide
  Target: APOC3; (+) strand; PAM type: NRG; PAM sequence: CAG
agggttgagggctggcctcc

SEQ ID NO: 10488 - DNA, 20 bp, Artificial Sequence
  Description of Artificial Sequence: Synthetic oligonucleotide
  Target: APOC3; (+) strand; PAM type: NRG; PAM sequence: CAG
gggctggcctcccagcgccc

SEQ ID NO: 10489 - DNA, 20 bp, Artificial Sequence
  Description of Artificial Sequence: Synthetic oligonucleotide
  Target: APOC3; (+) strand; PAM type: NRG; PAM sequence: CAG
ctcccagcgccccagcctat

SEQ ID NO: 10490 - DNA, 20 bp, Artificial Sequence
  Description of Artificial Sequence: Synthetic oligonucleotide
  Target: APOC3; (+) strand; PAM type: NRG; PAM sequence: AGG
tcccagcgccccagcctatc

SEQ ID NO: 10491 - DNA, 20 bp, Artificial Sequence
  Description of Artificial Sequence: Synthetic oligonucleotide
  Target: APOC3; (+) strand; PAM type: NRG; PAM sequence: GGG
cccagcgccccagcctatca

SEQ ID NO: 10492 - DNA, 20 bp, Artificial Sequence
  Description of Artificial Sequence: Synthetic oligonucleotide
  Target: APOC3; (+) strand; PAM type: NRG; PAM sequence: GGG
ccagcgccccagcctatcag

SEQ ID NO: 10493 - DNA, 20 bp, Artificial Sequence
  Description of Artificial Sequence: Synthetic oligonucleotide
  Target: APOC3; (+) strand; PAM type: NRG; PAM sequence: GAG
cgccccagcctatcaggggt

SEQ ID NO: 10494 - DNA, 20 bp, Artificial Sequence
  Description of Artificial Sequence: Synthetic oligonucleotide
  Target: APOC3; (+) strand; PAM type: NRG; PAM sequence: TGG
agcctatcaggggtgagccc

SEQ ID NO: 10495 - DNA, 20 bp, Artificial Sequence
  Description of Artificial Sequence: Synthetic oligonucleotide
  Target: APOC3; (+) strand; PAM type: NRG; PAM sequence: GGG
gcctatcaggggtgagccct

SEQ ID NO: 10496 - DNA, 20 bp, Artificial Sequence
  Description of Artificial Sequence: Synthetic oligonucleotide
  Target: APOC3; (+) strand; PAM type: NRG; PAM sequence: CGG
ccctgggtgacacctgtccg

SEQ ID NO: 10497 - DNA, 20 bp, Artificial Sequence
  Description of Artificial Sequence: Synthetic oligonucleotide
  Target: APOC3; (+) strand; PAM type: NRG; PAM sequence: GAG
ctgggtgacacctgtccgcg

SEQ ID NO: 10498 - DNA, 20 bp, Artificial Sequence
  Description of Artificial Sequence: Synthetic oligonucleotide
  Target: APOC3; (+) strand; PAM type: NRG; PAM sequence: AGG
tgggtgacacctgtccgcgg

SEQ ID NO: 10499 - DNA, 20 bp, Artificial Sequence
  Description of Artificial Sequence: Synthetic oligonucleotide
  Target: APOC3; (+) strand; PAM type: NRG; PAM sequence: CAG
gacacctgtccgcggaggtg

SEQ ID NO: 10500 - DNA, 20 bp, Artificial Sequence
  Description of Artificial Sequence: Synthetic oligonucleotide
  Target: APOC3; (+) strand; PAM type: NRG; PAM sequence: TGG
acctgtccgcggaggtgcag

SEQ ID NO: 10501 - DNA, 20 bp, Artificial Sequence
  Description of Artificial Sequence: Synthetic oligonucleotide
  Target: APOC3; (+) strand; PAM type: NRG; PAM sequence: TAG
tccgcggaggtgcagtggcc

SEQ ID NO: 10502 - DNA, 20 bp, Artificial Sequence
  Description of Artificial Sequence: Synthetic oligonucleotide
  Target: APOC3; (+) strand; PAM type: NRG; PAM sequence: CAG
gtgcagtggcctagcatttc

SEQ ID NO: 10503 - DNA, 20 bp, Artificial Sequence
  Description of Artificial Sequence: Synthetic oligonucleotide
  Target: APOC3; (+) strand; PAM type: NRG; PAM sequence: CAG
aaccaacacccctgccccgc

SEQ ID NO: 10504 - DNA, 20 bp, Artificial Sequence
  Description of Artificial Sequence: Synthetic oligonucleotide
  Target: APOC3; (+) strand; PAM type: NRG; PAM sequence: AGG
accaacacccctgccccgcc

SEQ ID NO: 10505 - DNA, 20 bp, Artificial Sequence
  Description of Artificial Sequence: Synthetic oligonucleotide
  Target: APOC3; (+) strand; PAM type: NRG; PAM sequence: CAG
ccaggccatgccccgttgtg

SEQ ID NO: 10506 - DNA, 20 bp, Artificial Sequence
  Description of Artificial Sequence: Synthetic oligonucleotide
  Target: APOC3; (+) strand; PAM type: NRG; PAM sequence: TGG
gccatgccccgttgtgcagc

SEQ ID NO: 10507 - DNA, 20 bp, Artificial Sequence
  Description of Artificial Sequence: Synthetic oligonucleotide
  Target: APOC3; (+) strand; PAM type: NRG; PAM sequence: GAG
ccccgttgtgcagctggacc

SEQ ID NO: 10508 - DNA, 20 bp, Artificial Sequence
  Description of Artificial Sequence: Synthetic oligonucleotide
  Target: APOC3; (+) strand; PAM type: NRG; PAM sequence: AGG
cccgttgtgcagctggaccg

SEQ ID NO: 10509 - DNA, 20 bp, Artificial Sequence
  Description of Artificial Sequence: Synthetic oligonucleotide
  Target: APOC3; (+) strand; PAM type: NRG; PAM sequence: CAG
tgtgcagctggaccgaggca

SEQ ID NO: 10510 - DNA, 20 bp, Artificial Sequence
  Description of Artificial Sequence: Synthetic oligonucleotide
  Target: APOC3; (+) strand; PAM type: NRG; PAM sequence: GAG
tgcagctggaccgaggcaca

SEQ ID NO: 10511 - DNA, 20 bp, Artificial Sequence
  Description of Artificial Sequence: Synthetic oligonucleotide
  Target: APOC3; (+) strand; PAM type: NRG; PAM sequence: GAG
cagctggaccgaggcacaga

SEQ ID NO: 10512 - DNA, 20 bp, Artificial Sequence
  Description of Artificial Sequence: Synthetic oligonucleotide
  Target: APOC3; (+) strand; PAM type: NRG; PAM sequence: AGG
agctggaccgaggcacagag

SEQ ID NO: 10513 - DNA, 20 bp, Artificial Sequence
  Description of Artificial Sequence: Synthetic oligonucleotide
  Target: APOC3; (+) strand; PAM type: NRG; PAM sequence: GAG
ctggaccgaggcacagagag

SEQ ID NO: 10514 - DNA, 20 bp, Artificial Sequence
  Description of Artificial Sequence: Synthetic oligonucleotide
  Target: APOC3; (+) strand; PAM type: NRG; PAM sequence: AAG
aggcacagagaggagctaaa

SEQ ID NO: 10515 - DNA, 20 bp, Artificial Sequence
  Description of Artificial Sequence: Synthetic oligonucleotide
  Target: APOC3; (+) strand; PAM type: NRG; PAM sequence: AGG
ggcacagagaggagctaaaa

SEQ ID NO: 10516 - DNA, 20 bp, Artificial Sequence
  Description of Artificial Sequence: Synthetic oligonucleotide
  Target: APOC3; (+) strand; PAM type: NRG; PAM sequence: GAG
cacagagaggagctaaaaag

SEQ ID NO: 10517 - DNA, 20 bp, Artificial Sequence
  Description of Artificial Sequence: Synthetic oligonucleotide
  Target: APOC3; (+) strand; PAM type: NRG; PAM sequence: CAG
gagaggagctaaaaaggaga

SEQ ID NO: 10518 - DNA, 20 bp, Artificial Sequence
  Description of Artificial Sequence: Synthetic oligonucleotide
  Target: APOC3; (+) strand; PAM type: NRG; PAM sequence: GAG
gaggagctaaaaaggagaca

SEQ ID NO: 10519 - DNA, 20 bp, Artificial Sequence
  Description of Artificial Sequence: Synthetic oligonucleotide
  Target: APOC3; (+) strand; PAM type: NRG; PAM sequence: TGG
agctaaaaaggagacagagc

SEQ ID NO: 10520 - DNA, 20 bp, Artificial Sequence
  Description of Artificial Sequence: Synthetic oligonucleotide
  Target: APOC3; (+) strand; PAM type: NRG; PAM sequence: GGG
gctaaaaaggagacagagct

SEQ ID NO: 10521 - DNA, 20 bp, Artificial Sequence
  Description of Artificial Sequence: Synthetic oligonucleotide
  Target: APOC3; (+) strand; PAM type: NRG; PAM sequence: TAG
aaaggagacagagctgggac

SEQ ID NO: 10522 - DNA, 20 bp, Artificial Sequence
  Description of Artificial Sequence: Synthetic oligonucleotide
  Target: APOC3; (+) strand; PAM type: NRG; PAM sequence: CAG
acagagctgggactagtgcc

SEQ ID NO: 10523 - DNA, 20 bp, Artificial Sequence
  Description of Artificial Sequence: Synthetic oligonucleotide
  Target: APOC3; (+) strand; PAM type: NRG; PAM sequence: TGG
ggactagtgcccagttacgt

SEQ ID NO: 10524 - DNA, 20 bp, Artificial Sequence
  Description of Artificial Sequence: Synthetic oligonucleotide
  Target: APOC3; (+) strand; PAM type: NRG; PAM sequence: AAG
cccagttacgttggtctcca

SEQ ID NO: 10525 - DNA, 20 bp, Artificial Sequence
  Description of Artificial Sequence: Synthetic oligonucleotide
  Target: APOC3; (+) strand; PAM type: NRG; PAM sequence: TGG
agttacgttggtctccaaag

SEQ ID NO: 10526 - DNA, 20 bp, Artificial Sequence
  Description of Artificial Sequence: Synthetic oligonucleotide
  Target: APOC3; (+) strand; PAM type: NRG; PAM sequence: GGG
gttacgttggtctccaaagt

SEQ ID NO: 10527 - DNA, 20 bp, Artificial Sequence
  Description of Artificial Sequence: Synthetic oligonucleotide
  Target: APOC3; (+) strand; PAM type: NRG; PAM sequence: AAG
gtctccaaagtgggcccttg

SEQ ID NO: 10528 - DNA, 20 bp, Artificial Sequence
  Description of Artificial Sequence: Synthetic oligonucleotide
  Target: APOC3; (+) strand; PAM type: NRG; PAM sequence: AGG
tctccaaagtgggcccttga

SEQ ID NO: 10529 - DNA, 20 bp, Artificial Sequence
  Description of Artificial Sequence: Synthetic oligonucleotide
  Target: APOC3; (+) strand; PAM type: NRG; PAM sequence: CAG
ggacctcgcttctatgcctc

SEQ ID NO: 10530 - DNA, 20 bp, Artificial Sequence
  Description of Artificial Sequence: Synthetic oligonucleotide
  Target: APOC3; (+) strand; PAM type: NRG; PAM sequence: AAG
ccagcgcattctcctctccg

SEQ ID NO: 10531 - DNA, 20 bp, Artificial Sequence
  Description of Artificial Sequence: Synthetic oligonucleotide
  Target: APOC3; (+) strand; PAM type: NRG; PAM sequence: CAG
cgcattctcctctccgaaga

SEQ ID NO: 10532 - DNA, 20 bp, Artificial Sequence
  Description of Artificial Sequence: Synthetic oligonucleotide
  Target: APOC3; (+) strand; PAM type: NRG; PAM sequence: CAG
tcctctccgaagacagccca

SEQ ID NO: 10533 - DNA, 20 bp, Artificial Sequence
  Description of Artificial Sequence: Synthetic oligonucleotide
  Target: APOC3; (+) strand; PAM type: NRG; PAM sequence: TGG
aagacagcccacagtcttgc

SEQ ID NO: 10534 - DNA, 20 bp, Artificial Sequence
  Description of Artificial Sequence: Synthetic oligonucleotide
  Target: APOC3; (+) strand; PAM type: NRG; PAM sequence: GGG
agacagcccacagtcttgct

SEQ ID NO: 10535 - DNA, 20 bp, Artificial Sequence
  Description of Artificial Sequence: Synthetic oligonucleotide
  Target: APOC3; (+) strand; PAM type: NRG; PAM sequence: CAG
cagcccacagtcttgctggg

SEQ ID NO: 10536 - DNA, 20 bp, Artificial Sequence
  Description of Artificial Sequence: Synthetic oligonucleotide
  Target: APOC3; (+) strand; PAM type: NRG; PAM sequence: AGG
agcccacagtcttgctgggc

SEQ ID NO: 10537 - DNA, 20 bp, Artificial Sequence
  Description of Artificial Sequence: Synthetic oligonucleotide
  Target: APOC3; (+) strand; PAM type: NRG; PAM sequence: GAG
cccacagtcttgctgggcag

SEQ ID NO: 10538 - DNA, 20 bp, Artificial Sequence
  Description of Artificial Sequence: Synthetic oligonucleotide
  Target: APOC3; (+) strand; PAM type: NRG; PAM sequence: CAG
acagtcttgctgggcaggag

SEQ ID NO: 10539 - DNA, 20 bp, Artificial Sequence
  Description of Artificial Sequence: Synthetic oligonucleotide
  Target: APOC3; (+) strand; PAM type: NRG; PAM sequence: GAG
agtcttgctgggcaggagca

SEQ ID NO: 10540 - DNA, 20 bp, Artificial Sequence
  Description of Artificial Sequence: Synthetic oligonucleotide
  Target: APOC3; (+) strand; PAM type: NRG; PAM sequence: AGG
gtcttgctgggcaggagcag

SEQ ID NO: 10541 - DNA, 20 bp, Artificial Sequence
  Description of Artificial Sequence: Synthetic oligonucleotide
  Target: APOC3; (+) strand; PAM type: NRG; PAM sequence: GAG
cttgctgggcaggagcagag

SEQ ID NO: 10542 - DNA, 20 bp, Artificial Sequence
  Description of Artificial Sequence: Synthetic oligonucleotide
  Target: APOC3; (+) strand; PAM type: NRG; PAM sequence: AGG
ttgctgggcaggagcagagg

SEQ ID NO: 10543 - DNA, 20 bp, Artificial Sequence
  Description of Artificial Sequence: Synthetic oligonucleotide
  Target: APOC3; (+) strand; PAM type: NRG; PAM sequence: TGG
ctgggcaggagcagaggagg

SEQ ID NO: 10544 - DNA, 20 bp, Artificial Sequence
  Description of Artificial Sequence: Synthetic oligonucleotide
  Target: APOC3; (+) strand; PAM type: NRG; PAM sequence: AAG
caggagcagaggaggtggtg

SEQ ID NO: 10545 - DNA, 20 bp, Artificial Sequence
  Description of Artificial Sequence: Synthetic oligonucleotide
  Target: APOC3; (+) strand; PAM type: NRG; PAM sequence: AAG
gagcagaggaggtggtgaag

SEQ ID NO: 10546 - DNA, 20 bp, Artificial Sequence
  Description of Artificial Sequence: Synthetic oligonucleotide
  Target: APOC3; (+) strand; PAM type: NRG; PAM sequence: AGG
agcagaggaggtggtgaaga

SEQ ID NO: 10547 - DNA, 20 bp, Artificial Sequence
  Description of Artificial Sequence: Synthetic oligonucleotide
  Target: APOC3; (+) strand; PAM type: NRG; PAM sequence: GGG
gcagaggaggtggtgaagaa

SEQ ID NO: 10548 - DNA, 20 bp, Artificial Sequence
  Description of Artificial Sequence: Synthetic oligonucleotide
  Target: APOC3; (+) strand; PAM type: NRG; PAM sequence: AAG
aggaggtggtgaagaaggga

SEQ ID NO: 10549 - DNA, 20 bp, Artificial Sequence
  Description of Artificial Sequence: Synthetic oligonucleotide
  Target: APOC3; (+) strand; PAM type: NRG; PAM sequence: AGG
ggaggtggtgaagaagggaa

SEQ ID NO: 10550 - DNA, 20 bp, Artificial Sequence
  Description of Artificial Sequence: Synthetic oligonucleotide
  Target: APOC3; (+) strand; PAM type: NRG; PAM sequence: GGG
gaggtggtgaagaagggaaa

SEQ ID NO: 10551 - DNA, 20 bp, Artificial Sequence
  Description of Artificial Sequence: Synthetic oligonucleotide
  Target: APOC3; (+) strand; PAM type: NRG; PAM sequence: GGG
aggtggtgaagaagggaaag

SEQ ID NO: 10552 - DNA, 20 bp, Artificial Sequence
  Description of Artificial Sequence: Synthetic oligonucleotide
  Target: APOC3; (+) strand; PAM type: NRG; PAM sequence: CAG
aaaggggcttgctacacttg

SEQ ID NO: 10553 - DNA, 20 bp, Artificial Sequence
  Description of Artificial Sequence: Synthetic oligonucleotide
  Target: APOC3; (+) strand; PAM type: NRG; PAM sequence: AGG
aaggggcttgctacacttgc

SEQ ID NO: 10554 - DNA, 20 bp, Artificial Sequence
  Description of Artificial Sequence: Synthetic oligonucleotide
  Target: APOC3; (+) strand; PAM type: NRG; PAM sequence: TGG
ctacacttgcaggcacaatg

SEQ ID NO: 10555 - DNA, 20 bp, Artificial Sequence
  Description of Artificial Sequence: Synthetic oligonucleotide
  Target: APOC3; (+) strand; PAM type: NRG; PAM sequence: CGG
gtggctctgtgatcacgcat

SEQ ID NO: 10556 - DNA, 20 bp, Artificial Sequence
  Description of Artificial Sequence: Synthetic oligonucleotide
  Target: APOC3; (+) strand; PAM type: NRG; PAM sequence: GGG
tggctctgtgatcacgcatc

SEQ ID NO: 10557 - DNA, 20 bp, Artificial Sequence
  Description of Artificial Sequence: Synthetic oligonucleotide
  Target: APOC3; (+) strand; PAM type: NRG; PAM sequence: CAG
ctctgtgatcacgcatcggg

SEQ ID NO: 10558 - DNA, 20 bp, Artificial Sequence
  Description of Artificial Sequence: Synthetic oligonucleotide
  Target: APOC3; (+) strand; PAM type: NRG; PAM sequence: TGG
gatcacgcatcgggcagccc

SEQ ID NO: 10559 - DNA, 20 bp, Artificial Sequence
  Description of Artificial Sequence: Synthetic oligonucleotide
  Target: APOC3; (+) strand; PAM type: NRG; PAM sequence: CAG
cagccctggtctgtcctttg

SEQ ID NO: 10560 - DNA, 20 bp, Artificial Sequence
  Description of Artificial Sequence: Synthetic oligonucleotide
  Target: APOC3; (+) strand; PAM type: NRG; PAM sequence: AGG
agccctggtctgtcctttgc

SEQ ID NO: 10561 - DNA, 20 bp, Artificial Sequence
  Description of Artificial Sequence: Synthetic oligonucleotide
  Target: APOC3; (+) strand; PAM type: NRG; PAM sequence: GGG
gccctggtctgtcctttgca

SEQ ID NO: 10562 - DNA, 20 bp, Artificial Sequence
  Description of Artificial Sequence: Synthetic oligonucleotide
  Target: APOC3; (+) strand; PAM type: NRG; PAM sequence: GGG
ccctggtctgtcctttgcag

SEQ ID NO: 10563 - DNA, 20 bp, Artificial Sequence
  Description of Artificial Sequence: Synthetic oligonucleotide
  Target: APOC3; (+) strand; PAM type: NRG; PAM sequence: TGG
tctgtcctttgcaggggaca

SEQ ID NO: 10564 - DNA, 20 bp, Artificial Sequence
  Description of Artificial Sequence: Synthetic oligonucleotide
  Target: APOC3; (+) strand; PAM type: NRG; PAM sequence: GGG
ctgtcctttgcaggggacat

SEQ ID NO: 10565 - DNA, 20 bp, Artificial Sequence
  Description of Artificial Sequence: Synthetic oligonucleotide
  Target: APOC3; (+) strand; PAM type: NRG; PAM sequence: TGG
acatgggctgtgaccctgcc

SEQ ID NO: 10566 - DNA, 20 bp, Artificial Sequence
  Description of Artificial Sequence: Synthetic oligonucleotide
  Target: APOC3; (+) strand; PAM type: NRG; PAM sequence: GAG
atgggctgtgaccctgcctg

SEQ ID NO: 10567 - DNA, 20 bp, Artificial Sequence
  Description of Artificial Sequence: Synthetic oligonucleotide
  Target: APOC3; (+) strand; PAM type: NRG; PAM sequence: CAG
cctgcctggagatcccattc

SEQ ID NO: 10568 - DNA, 20 bp, Artificial Sequence
  Description of Artificial Sequence: Synthetic oligonucleotide
  Target: APOC3; (+) strand; PAM type: NRG; PAM sequence: CAG
cccattccagtttctccatc

SEQ ID NO: 10569 - DNA, 20 bp, Artificial Sequence
  Description of Artificial Sequence: Synthetic oligonucleotide
  Target: APOC3; (+) strand; PAM type: NRG; PAM sequence: TGG
ttctccatccagaccatctg

SEQ ID NO: 10570 - DNA, 20 bp, Artificial Sequence
  Description of Artificial Sequence: Synthetic oligonucleotide
  Target: APOC3; (+) strand; PAM type: NRG; PAM sequence: GGG
tctccatccagaccatctgt

SEQ ID NO: 10571 - DNA, 20 bp, Artificial Sequence
  Description of Artificial Sequence: Synthetic oligonucleotide
  Target: APOC3; (+) strand; PAM type: NRG; PAM sequence: GGG
ctccatccagaccatctgtg

SEQ ID NO: 10572 - DNA, 20 bp, Artificial Sequence
  Description of Artificial Sequence: Synthetic oligonucleotide
  Target: APOC3; (+) strand; PAM type: NRG; PAM sequence: CAG
tccagaccatctgtggggcc

SEQ ID NO: 10573 - DNA, 20 bp, Artificial Sequence
  Description of Artificial Sequence: Synthetic oligonucleotide
  Target: APOC3; (+) strand; PAM type: NRG; PAM sequence: CAG
atctgtggggcccagctcat

SEQ ID NO: 10574 - DNA, 20 bp, Artificial Sequence
  Description of Artificial Sequence: Synthetic oligonucleotide
  Target: APOC3; (+) strand; PAM type: NRG; PAM sequence: TAG
gggcccagctcatcagatat

SEQ ID NO: 10575 - DNA, 20 bp, Artificial Sequence
  Description of Artificial Sequence: Synthetic oligonucleotide
  Target: APOC3; (+) strand; PAM type: NRG; PAM sequence: AGG
ggcccagctcatcagatatt

SEQ ID NO: 10576 - DNA, 20 bp, Artificial Sequence
  Description of Artificial Sequence: Synthetic oligonucleotide
  Target: APOC3; (+) strand; PAM type: NRG; PAM sequence: GAG
cagctcatcagatattaggt

SEQ ID NO: 10577 - DNA, 20 bp, Artificial Sequence
  Description of Artificial Sequence: Synthetic oligonucleotide
  Target: APOC3; (+) strand; PAM type: NRG; PAM sequence: AGG
agctcatcagatattaggtg

SEQ ID NO: 10578 - DNA, 20 bp, Artificial Sequence
  Description of Artificial Sequence: Synthetic oligonucleotide
  Target: APOC3; (+) strand; PAM type: NRG; PAM sequence: CGG
tcagatattaggtgaggact

SEQ ID NO: 10579 - DNA, 20 bp, Artificial Sequence
  Description of Artificial Sequence: Synthetic oligonucleotide
  Target: APOC3; (+) strand; PAM type: NRG; PAM sequence: CAG
atattaggtgaggactcggc

SEQ ID NO: 10580 - DNA, 20 bp, Artificial Sequence
  Description of Artificial Sequence: Synthetic oligonucleotide
  Target: APOC3; (+) strand; PAM type: NRG; PAM sequence: TGG
aggtgaggactcggccagtc

SEQ ID NO: 10581 - DNA, 20 bp, Artificial Sequence
  Description of Artificial Sequence: Synthetic oligonucleotide
  Target: APOC3; (+) strand; PAM type: NRG; PAM sequence: CAG
ctggcttcaacatcatccca

SEQ ID NO: 10582 - DNA, 20 bp, Artificial Sequence
  Description of Artificial Sequence: Synthetic oligonucleotide
  Target: APOC3; (+) strand; PAM type: NRG; PAM sequence: AGG
tggcttcaacatcatcccac

SEQ ID NO: 10583 - DNA, 20 bp, Artificial Sequence
  Description of Artificial Sequence: Synthetic oligonucleotide
  Target: APOC3; (+) strand; PAM type: NRG; PAM sequence: CAG
cctacccctgccctcaaccc

SEQ ID NO: 10584 - DNA, 20 bp, Artificial Sequence
  Description of Artificial Sequence: Synthetic oligonucleotide
  Target: APOC3; (+) strand; PAM type: NRG; PAM sequence: AGG
ctacccctgccctcaacccc

SEQ ID NO: 10585 - DNA, 20 bp, Artificial Sequence
  Description of Artificial Sequence: Synthetic oligonucleotide
  Target: APOC3; (+) strand; PAM type: NRG; PAM sequence: TGG
ccctgccctcaaccccaggc

SEQ ID NO: 10586 - DNA, 20 bp, Artificial Sequence
  Description of Artificial Sequence: Synthetic oligonucleotide
  Target: APOC3; (+) strand; PAM type: NRG; PAM sequence: GGG
cctgccctcaaccccaggct

SEQ ID NO: 10587 - DNA, 20 bp, Artificial Sequence
  Description of Artificial Sequence: Synthetic oligonucleotide
  Target: APOC3; (+) strand; PAM type: NRG; PAM sequence: TAG
cccaggctgggtccttactt

SEQ ID NO: 10588 - DNA, 20 bp, Artificial Sequence
  Description of Artificial Sequence: Synthetic oligonucleotide
  Target: APOC3; (+) strand; PAM type: NRG; PAM sequence: AAG
cttactttagctgttttccc

SEQ ID NO: 10589 - DNA, 20 bp, Artificial Sequence
  Description of Artificial Sequence: Synthetic oligonucleotide
  Target: APOC3; (+) strand; PAM type: NRG; PAM sequence: AGG
ttactttagctgttttccca

SEQ ID NO: 10590 - DNA, 20 bp, Artificial Sequence
  Description of Artificial Sequence: Synthetic oligonucleotide
  Target: APOC3; (+) strand; PAM type: NRG; PAM sequence: CGG
ctttagctgttttcccaagg

SEQ ID NO: 10591 - DNA, 20 bp, Artificial Sequence
  Description of Artificial Sequence: Synthetic oligonucleotide
  Target: APOC3; (+) strand; PAM type: NRG; PAM sequence: GAG
ttagctgttttcccaaggcg

SEQ ID NO: 10592 - DNA, 20 bp, Artificial Sequence
  Description of Artificial Sequence: Synthetic oligonucleotide
  Target: APOC3; (+) strand; PAM type: NRG; PAM sequence: TGG
ccaaggcggagccttcaaac

SEQ ID NO: 10593 - DNA, 20 bp, Artificial Sequence
  Description of Artificial Sequence: Synthetic oligonucleotide
  Target: APOC3; (+) strand; PAM type: NRG; PAM sequence: GGG
caaggcggagccttcaaact

SEQ ID NO: 10594 - DNA, 20 bp, Artificial Sequence
  Description of Artificial Sequence: Synthetic oligonucleotide
  Target: APOC3; (+) strand; PAM type: NRG; PAM sequence: TAG
agccttcaaactgggacaca

SEQ ID NO: 10595 - DNA, 20 bp, Artificial Sequence
  Description of Artificial Sequence: Synthetic oligonucleotide
  Target: APOC3; (+) strand; PAM type: NRG; PAM sequence: GAG
tagtctctgccgctgtcttt

SEQ ID NO: 10596 - DNA, 20 bp, Artificial Sequence
  Description of Artificial Sequence: Synthetic oligonucleotide
  Target: APOC3; (+) strand; PAM type: NRG; PAM sequence: CAG
tttgagcacatccacgtaca

SEQ ID NO: 10597 - DNA, 20 bp, Artificial Sequence
  Description of Artificial Sequence: Synthetic oligonucleotide
  Target: APOC3; (+) strand; PAM type: NRG; PAM sequence: TGG
gagcacatccacgtacacag

SEQ ID NO: 10598 - DNA, 20 bp, Artificial Sequence
  Description of Artificial Sequence: Synthetic oligonucleotide
  Target: APOC3; (+) strand; PAM type: NRG; PAM sequence: CAG
acatccacgtacacagtggc

SEQ ID NO: 10599 - DNA, 20 bp, Artificial Sequence
  Description of Artificial Sequence: Synthetic oligonucleotide
  Target: APOC3; (+) strand; PAM type: NRG; PAM sequence: AGG
catccacgtacacagtggcc

SEQ ID NO: 10600 - DNA, 20 bp, Artificial Sequence
  Description of Artificial Sequence: Synthetic oligonucleotide
  Target: APOC3; (+) strand; PAM type: NRG; PAM sequence: CAG
ccaggtccttcactcgatcc

SEQ ID NO: 10601 - DNA, 20 bp, Artificial Sequence
  Description of Artificial Sequence: Synthetic oligonucleotide
  Target: APOC3; (+) strand; PAM type: NRG; PAM sequence: AGG
caggtccttcactcgatccc

SEQ ID NO: 10602 - DNA, 20 bp, Artificial Sequence
  Description of Artificial Sequence: Synthetic oligonucleotide
  Target: APOC3; (+) strand; PAM type: NRG; PAM sequence: GGG
aggtccttcactcgatccca

SEQ ID NO: 10603 - DNA, 20 bp, Artificial Sequence
  Description of Artificial Sequence: Synthetic oligonucleotide
  Target: APOC3; (+) strand; PAM type: NRG; PAM sequence: GGG
ggtccttcactcgatcccag

SEQ ID NO: 10604 - DNA, 20 bp, Artificial Sequence
  Description of Artificial Sequence: Synthetic oligonucleotide
  Target: APOC3; (+) strand; PAM type: NRG; PAM sequence: TGG
tcactcgatcccaggggctc

SEQ ID NO: 10605 - DNA, 20 bp, Artificial Sequence
  Description of Artificial Sequence: Synthetic oligonucleotide
  Target: APOC3; (+) strand; PAM type: NRG; PAM sequence: GGG
cactcgatcccaggggctct

SEQ ID NO: 10606 - DNA, 20 bp, Artificial Sequence
  Description of Artificial Sequence: Synthetic oligonucleotide
  Target: APOC3; (+) strand; PAM type: NRG; PAM sequence: GGG
actcgatcccaggggctctg

SEQ ID NO: 10607 - DNA, 20 bp, Artificial Sequence
  Description of Artificial Sequence: Synthetic oligonucleotide
  Target: APOC3; (+) strand; PAM type: NRG; PAM sequence: GGG
ctcgatcccaggggctctgg

SEQ ID NO: 10608 - DNA, 20 bp, Artificial Sequence
  Description of Artificial Sequence: Synthetic oligonucleotide
  Target: APOC3; (+) strand; PAM type: NRG; PAM sequence: GGG
tcgatcccaggggctctggg

SEQ ID NO: 10609 - DNA, 20 bp, Artificial Sequence
  Description of Artificial Sequence: Synthetic oligonucleotide
  Target: APOC3; (+) strand; PAM type: NRG; PAM sequence: GGG
cgatcccaggggctctgggg

SEQ ID NO: 10610 - DNA, 20 bp, Artificial Sequence
  Description of Artificial Sequence: Synthetic oligonucleotide
  Target: APOC3; (+) strand; PAM type: NRG; PAM sequence: CAG
gggggggttcatcttgctgc

SEQ ID NO: 10611 - DNA, 20 bp, Artificial Sequence
  Description of Artificial Sequence: Synthetic oligonucleotide
  Target: APOC3; (+) strand; PAM type: NRG; PAM sequence: GAG
atcttgctgccagaaatgcc

SEQ ID NO: 10612 - DNA, 20 bp, Artificial Sequence
  Description of Artificial Sequence: Synthetic oligonucleotide
  Target: APOC3; (+) strand; PAM type: NRG; PAM sequence: TGG
gctgccagaaatgccgagcc

SEQ ID NO: 10613 - DNA, 20 bp, Artificial Sequence
  Description of Artificial Sequence: Synthetic oligonucleotide
  Target: APOC3; (+) strand; PAM type: NRG; PAM sequence: GAG
aatgccgagcctggctccct

SEQ ID NO: 10614 - DNA, 20 bp, Artificial Sequence
  Description of Artificial Sequence: Synthetic oligonucleotide
  Target: APOC3; (+) strand; PAM type: NRG; PAM sequence: AGG
atgccgagcctggctccctg

SEQ ID NO: 10615 - DNA, 20 bp, Artificial Sequence
  Description of Artificial Sequence: Synthetic oligonucleotide
  Target: APOC3; (+) strand; PAM type: NRG; PAM sequence: GGG
tgccgagcctggctccctga

SEQ ID NO: 10616 - DNA, 20 bp, Artificial Sequence
  Description of Artificial Sequence: Synthetic oligonucleotide
  Target: APOC3; (+) strand; PAM type: NRG; PAM sequence: TGG
cgagcctggctccctgaggg

SEQ ID NO: 10617 - DNA, 20 bp, Artificial Sequence
  Description of Artificial Sequence: Synthetic oligonucleotide
  Target: APOC3; (+) strand; PAM type: NRG; PAM sequence: GGG
gagcctggctccctgagggt

SEQ ID NO: 10618 - DNA, 20 bp, Artificial Sequence
  Description of Artificial Sequence: Synthetic oligonucleotide
  Target: APOC3; (+) strand; PAM type: NRG; PAM sequence: GAG
gcctggctccctgagggtgg

SEQ ID NO: 10619 - DNA, 20 bp, Artificial Sequence
  Description of Artificial Sequence: Synthetic oligonucleotide
  Target: APOC3; (+) strand; PAM type: NRG; PAM sequence: AGG
cctggctccctgagggtggg

SEQ ID NO: 10620 - DNA, 20 bp, Artificial Sequence
  Description of Artificial Sequence: Synthetic oligonucleotide
  Target: APOC3; (+) strand; PAM type: NRG; PAM sequence: GGG
ctggctccctgagggtggga

SEQ ID NO: 10621 - DNA, 20 bp, Artificial Sequence
  Description of Artificial Sequence: Synthetic oligonucleotide
  Target: APOC3; (+) strand; PAM type: NRG; PAM sequence: GGG
tggctccctgagggtgggag

SEQ ID NO: 10622 - DNA, 20 bp, Artificial Sequence
  Description of Artificial Sequence: Synthetic oligonucleotide
  Target: APOC3; (+) strand; PAM type: NRG; PAM sequence: GAG
gctccctgagggtgggaggg

SEQ ID NO: 10623 - DNA, 20 bp, Artificial Sequence
  Description of Artificial Sequence: Synthetic oligonucleotide
  Target: APOC3; (+) strand; PAM type: NRG; PAM sequence: CAG
tgagggtgggaggggagacc

SEQ ID NO: 10624 - DNA, 20 bp, Artificial Sequence
  Description of Artificial Sequence: Synthetic oligonucleotide
  Target: APOC3; (+) strand; PAM type: NRG; PAM sequence: CAG
gtgggaggggagacccagat

SEQ ID NO: 10625 - DNA, 20 bp, Artificial Sequence
  Description of Artificial Sequence: Synthetic oligonucleotide
  Target: APOC3; (+) strand; PAM type: NRG; PAM sequence: AGG
tgggaggggagacccagatc

SEQ ID NO: 10626 - DNA, 20 bp, Artificial Sequence
  Description of Artificial Sequence: Synthetic oligonucleotide
  Target: APOC3; (+) strand; PAM type: NRG; PAM sequence: CAG
aggggagacccagatcaggc

SEQ ID NO: 10627 - DNA, 20 bp, Artificial Sequence
  Description of Artificial Sequence: Synthetic oligonucleotide
  Target: APOC3; (+) strand; PAM type: NRG; PAM sequence: TGG
gacccagatcaggccagctg

SEQ ID NO: 10628 - DNA, 20 bp, Artificial Sequence
  Description of Artificial Sequence: Synthetic oligonucleotide
  Target: APOC3; (+) strand; PAM type: NRG; PAM sequence: GGG
acccagatcaggccagctgt

SEQ ID NO: 10629 - DNA, 20 bp, Artificial Sequence
  Description of Artificial Sequence: Synthetic oligonucleotide
  Target: APOC3; (+) strand; PAM type: NRG; PAM sequence: GAG
gatcaggccagctgtgggct

SEQ ID NO: 10630 - DNA, 20 bp, Artificial Sequence
  Description of Artificial Sequence: Synthetic oligonucleotide
  Target: APOC3; (+) strand; PAM type: NRG; PAM sequence: GAG
ccagctgtgggctgagatct

SEQ ID NO: 10631 - DNA, 20 bp, Artificial Sequence
  Description of Artificial Sequence: Synthetic oligonucleotide
  Target: APOC3; (+) strand; PAM type: NRG; PAM sequence: AAG
tgggctgagatctgagccga

SEQ ID NO: 10632 - DNA, 20 bp, Artificial Sequence
  Description of Artificial Sequence: Synthetic oligonucleotide
  Target: APOC3; (+) strand; PAM type: NRG; PAM sequence: AGG
gggctgagatctgagccgaa

SEQ ID NO: 10633 - DNA, 20 bp, Artificial Sequence
  Description of Artificial Sequence: Synthetic oligonucleotide
  Target: APOC3; (+) strand; PAM type: NRG; PAM sequence: AAG
gagatctgagccgaaaggcc

SEQ ID NO: 10634 - DNA, 20 bp, Artificial Sequence
  Description of Artificial Sequence: Synthetic oligonucleotide
  Target: APOC3; (+) strand; PAM type: NRG; PAM sequence: TGG
ctgagccgaaaggccaagct

SEQ ID NO: 10635 - DNA, 20 bp, Artificial Sequence
  Description of Artificial Sequence: Synthetic oligonucleotide
  Target: APOC3; (+) strand; PAM type: NRG; PAM sequence: GAG
gagccgaaaggccaagcttg

SEQ ID NO: 10636 - DNA, 20 bp, Artificial Sequence
  Description of Artificial Sequence: Synthetic oligonucleotide
  Target: APOC3; (+) strand; PAM type: NRG; PAM sequence: AGG
agccgaaaggccaagcttgg

SEQ ID NO: 10637 - DNA, 20 bp, Artificial Sequence
  Description of Artificial Sequence: Synthetic oligonucleotide
  Target: APOC3; (+) strand; PAM type: NRG; PAM sequence: TGG
cgaaaggccaagcttggagg

SEQ ID NO: 10638 - DNA, 20 bp, Artificial Sequence
  Description of Artificial Sequence: Synthetic oligonucleotide
  Target: APOC3; (+) strand; PAM type: NRG; PAM sequence: GGG
gaaaggccaagcttggaggt

SEQ ID NO: 10639 - DNA, 20 bp, Artificial Sequence
  Description of Artificial Sequence: Synthetic oligonucleotide
  Target: APOC3; (+) strand; PAM type: NRG; PAM sequence: GGG
aaaggccaagcttggaggtg

SEQ ID NO: 10640 - DNA, 20 bp, Artificial Sequence
  Description of Artificial Sequence: Synthetic oligonucleotide
  Target: APOC3; (+) strand; PAM type: NRG; PAM sequence: GGG
aaggccaagcttggaggtgg

SEQ ID NO: 10641 - DNA, 20 bp, Artificial Sequence
  Description of Artificial Sequence: Synthetic oligonucleotide
  Target: APOC3; (+) strand; PAM type: NRG; PAM sequence: GAG
ggccaagcttggaggtgggg

SEQ ID NO: 10642 - DNA, 20 bp, Artificial Sequence
  Description of Artificial Sequence: Synthetic oligonucleotide
  Target: APOC3; (+) strand; PAM type: NRG; PAM sequence: GAG
ccaagcttggaggtggggga

SEQ ID NO: 10643 - DNA, 20 bp, Artificial Sequence
  Description of Artificial Sequence: Synthetic oligonucleotide
  Target: APOC3; (+) strand; PAM type: NRG; PAM sequence: AGG
caagcttggaggtgggggag

SEQ ID NO: 10644 - DNA, 20 bp, Artificial Sequence
  Description of Artificial Sequence: Synthetic oligonucleotide
  Target: APOC3; (+) strand; PAM type: NRG; PAM sequence: GGG
aagcttggaggtgggggaga

SEQ ID NO: 10645 - DNA, 20 bp, Artificial Sequence
  Description of Artificial Sequence: Synthetic oligonucleotide
  Target: APOC3; (+) strand; PAM type: NRG; PAM sequence: GGG
agcttggaggtgggggagag

SEQ ID NO: 10646 - DNA, 20 bp, Artificial Sequence
  Description of Artificial Sequence: Synthetic oligonucleotide
  Target: APOC3; (+) strand; PAM type: NRG; PAM sequence: GGG
gcttggaggtgggggagagg

SEQ ID NO: 10647 - DNA, 20 bp, Artificial Sequence
  Description of Artificial Sequence: Synthetic oligonucleotide
  Target: APOC3; (+) strand; PAM type: NRG; PAM sequence: CAG
ggaggtgggggagagggggc

SEQ ID NO: 10648 - DNA, 20 bp, Artificial Sequence
  Description of Artificial Sequence: Synthetic oligonucleotide
  Target: APOC3; (+) strand; PAM type: NRG; PAM sequence: GAG
gtgggggagagggggccagt

SEQ ID NO: 10649 - DNA, 20 bp, Artificial Sequence
  Description of Artificial Sequence: Synthetic oligonucleotide
  Target: APOC3; (+) strand; PAM type: NRG; PAM sequence: CAG
agaaacctgctgcctctgcc

SEQ ID NO: 10650 - DNA, 20 bp, Artificial Sequence
  Description of Artificial Sequence: Synthetic oligonucleotide
  Target: APOC3; (+) strand; PAM type: NRG; PAM sequence: AGG
gaaacctgctgcctctgccc

SEQ ID NO: 10651 - DNA, 20 bp, Artificial Sequence
  Description of Artificial Sequence: Synthetic oligonucleotide
  Target: APOC3; (+) strand; PAM type: NRG; PAM sequence: GAG
aacctgctgcctctgcccag

SEQ ID NO: 10652 - DNA, 20 bp, Artificial Sequence
  Description of Artificial Sequence: Synthetic oligonucleotide
  Target: APOC3; (+) strand; PAM type: NRG; PAM sequence: AGG
acctgctgcctctgcccagg

SEQ ID NO: 10653 - DNA, 20 bp, Artificial Sequence
  Description of Artificial Sequence: Synthetic oligonucleotide
  Target: APOC3; (+) strand; PAM type: NRG; PAM sequence: GGG
cctgctgcctctgcccagga

SEQ ID NO: 10654 - DNA, 20 bp, Artificial Sequence
  Description of Artificial Sequence: Synthetic oligonucleotide
  Target: APOC3; (+) strand; PAM type: NRG; PAM sequence: TGG
gctgcctctgcccaggaggg

SEQ ID NO: 10655 - DNA, 20 bp, Artificial Sequence
  Description of Artificial Sequence: Synthetic oligonucleotide
  Target: APOC3; (+) strand; PAM type: NRG; PAM sequence: GGG
ctgcctctgcccaggagggt

SEQ ID NO: 10656 - DNA, 20 bp, Artificial Sequence
  Description of Artificial Sequence: Synthetic oligonucleotide
  Target: APOC3; (+) strand; PAM type: NRG; PAM sequence: CGG
ctgcccaggagggtgggcca

SEQ ID NO: 10657 - DNA, 20 bp, Artificial Sequence
  Description of Artificial Sequence: Synthetic oligonucleotide
  Target: APOC3; (+) strand; PAM type: NRG; PAM sequence: GGG
tgcccaggagggtgggccac

SEQ ID NO: 10658 - DNA, 20 bp, Artificial Sequence
  Description of Artificial Sequence: Synthetic oligonucleotide
  Target: APOC3; (+) strand; PAM type: NRG; PAM sequence: GGG
gcccaggagggtgggccacg

SEQ ID NO: 10659 - DNA, 20 bp, Artificial Sequence
  Description of Artificial Sequence: Synthetic oligonucleotide
  Target: APOC3; (+) strand; PAM type: NRG; PAM sequence: TAG
gagggtgggccacggggatt

SEQ ID NO: 10660 - DNA, 20 bp, Artificial Sequence
  Description of Artificial Sequence: Synthetic oligonucleotide
  Target: APOC3; (+) strand; PAM type: NRG; PAM sequence: AGG
agggtgggccacggggattt

SEQ ID NO: 10661 - DNA, 20 bp, Artificial Sequence
  Description of Artificial Sequence: Synthetic oligonucleotide
  Target: APOC3; (+) strand; PAM type: NRG; PAM sequence: GGG
gggtgggccacggggattta

SEQ ID NO: 10662 - DNA, 20 bp, Artificial Sequence
  Description of Artificial Sequence: Synthetic oligonucleotide
  Target: APOC3; (+) strand; PAM type: NRG; PAM sequence: GAG
gtgggccacggggatttagg

SEQ ID NO: 10663 - DNA, 20 bp, Artificial Sequence
  Description of Artificial Sequence: Synthetic oligonucleotide
  Target: APOC3; (+) strand; PAM type: NRG; PAM sequence: AAG
gccacggggatttagggaga

SEQ ID NO: 10664 - DNA, 20 bp, Artificial Sequence
  Description of Artificial Sequence: Synthetic oligonucleotide
  Target: APOC3; (+) strand; PAM type: NRG; PAM sequence: TGG
ttagggagaaagccccccga

SEQ ID NO: 10665 - DNA, 20 bp, Artificial Sequence
  Description of Artificial Sequence: Synthetic oligonucleotide
  Target: APOC3; (+) strand; PAM type: NRG; PAM sequence: TGG
ggagaaagccccccgatggt

SEQ ID NO: 10666 - DNA, 20 bp, Artificial Sequence
  Description of Artificial Sequence: Synthetic oligonucleotide
  Target: APOC3; (+) strand; PAM type: NRG; PAM sequence: TAG
ccccccgatggttggctccc

SEQ ID NO: 10667 - DNA, 20 bp, Artificial Sequence
  Description of Artificial Sequence: Synthetic oligonucleotide
  Target: APOC3; (+) strand; PAM type: NRG; PAM sequence: AGG
cccccgatggttggctccct

SEQ ID NO: 10668 - DNA, 20 bp, Artificial Sequence
  Description of Artificial Sequence: Synthetic oligonucleotide
  Target: APOC3; (+) strand; PAM type: NRG; PAM sequence: TAG
cgatggttggctccctaggt

SEQ ID NO: 10669 - DNA, 20 bp, Artificial Sequence
  Description of Artificial Sequence: Synthetic oligonucleotide
  Target: APOC3; (+) strand; PAM type: NRG; PAM sequence: AGG
gatggttggctccctaggtt

SEQ ID NO: 10670 - DNA, 20 bp, Artificial Sequence
  Description of Artificial Sequence: Synthetic oligonucleotide
  Target: APOC3; (+) strand; PAM type: NRG; PAM sequence: GGG
atggttggctccctaggtta

SEQ ID NO: 10671 - DNA, 20 bp, Artificial Sequence
  Description of Artificial Sequence: Synthetic oligonucleotide
  Target: APOC3; (+) strand; PAM type: NRG; PAM sequence: GGG
tggttggctccctaggttag

SEQ ID NO: 10672 - DNA, 20 bp, Artificial Sequence
  Description of Artificial Sequence: Synthetic oligonucleotide
  Target: APOC3; (+) strand; PAM type: NRG; PAM sequence: CAG
gttaggggacacctacccgt

SEQ ID NO: 10673 - DNA, 20 bp, Artificial Sequence
  Description of Artificial Sequence: Synthetic oligonucleotide
  Target: APOC3; (+) strand; PAM type: NRG; PAM sequence: AGG
ttaggggacacctacccgtc

SEQ ID NO: 10674 - DNA, 20 bp, Artificial Sequence
  Description of Artificial Sequence: Synthetic oligonucleotide
  Target: APOC3; (+) strand; PAM type: NRG; PAM sequence: AAG
ggggacacctacccgtcagg

SEQ ID NO: 10675 - DNA, 20 bp, Artificial Sequence
  Description of Artificial Sequence: Synthetic oligonucleotide
  Target: APOC3; (+) strand; PAM type: NRG; PAM sequence: GAG
ggacacctacccgtcaggaa

SEQ ID NO: 10676 - DNA, 20 bp, Artificial Sequence
  Description of Artificial Sequence: Synthetic oligonucleotide
  Target: APOC3; (+) strand; PAM type: NRG; PAM sequence: CGG
cctacccgtcaggaagagca

SEQ ID NO: 10677 - DNA, 20 bp, Artificial Sequence
  Description of Artificial Sequence: Synthetic oligonucleotide
  Target: APOC3; (+) strand; PAM type: NRG; PAM sequence: AAG
ccgtcaggaagagcacggcc

SEQ ID NO: 10678 - DNA, 20 bp, Artificial Sequence
  Description of Artificial Sequence: Synthetic oligonucleotide
  Target: APOC3; (+) strand; PAM type: NRG; PAM sequence: AGG
cgtcaggaagagcacggcca

SEQ ID NO: 10679 - DNA, 20 bp, Artificial Sequence
  Description of Artificial Sequence: Synthetic oligonucleotide
  Target: APOC3; (+) strand; PAM type: NRG; PAM sequence: CAG
aggaagagcacggccaaggt

SEQ ID NO: 10680 - DNA, 20 bp, Artificial Sequence
  Description of Artificial Sequence: Synthetic oligonucleotide
  Target: APOC3; (+) strand; PAM type: NRG; PAM sequence: CAG
cacggccaaggtcagcaccg

SEQ ID NO: 10681 - DNA, 20 bp, Artificial Sequence
  Description of Artificial Sequence: Synthetic oligonucleotide
  Target: APOC3; (+) strand; PAM type: NRG; PAM sequence: AAG
gcaccgcagctttcatcctg

SEQ ID NO: 10682 - DNA, 20 bp, Artificial Sequence
  Description of Artificial Sequence: Synthetic oligonucleotide
  Target: APOC3; (+) strand; PAM type: NRG; PAM sequence: AGG
caccgcagctttcatcctga

SEQ ID NO: 10683 - DNA, 20 bp, Artificial Sequence
  Description of Artificial Sequence: Synthetic oligonucleotide
  Target: APOC3; (+) strand; PAM type: NRG; PAM sequence: GGG
accgcagctttcatcctgaa

SEQ ID NO: 10684 - DNA, 20 bp, Artificial Sequence
  Description of Artificial Sequence: Synthetic oligonucleotide
  Target: APOC3; (+) strand; PAM type: NRG; PAM sequence: TGG
gctttcatcctgaagggccg

SEQ ID NO: 10685 - DNA, 20 bp, Artificial Sequence
  Description of Artificial Sequence: Synthetic oligonucleotide
  Target: APOC3; (+) strand; PAM type: NRG; PAM sequence: GGG
ctttcatcctgaagggccgt

SEQ ID NO: 10686 - DNA, 20 bp, Artificial Sequence
  Description of Artificial Sequence: Synthetic oligonucleotide
  Target: APOC3; (+) strand; PAM type: NRG; PAM sequence: GGG
tttcatcctgaagggccgtg

SEQ ID NO: 10687 - DNA, 20 bp, Artificial Sequence
  Description of Artificial Sequence: Synthetic oligonucleotide
  Target: APOC3; (+) strand; PAM type: NRG; PAM sequence: GGG
ttcatcctgaagggccgtgg

SEQ ID NO: 10688 - DNA, 20 bp, Artificial Sequence
  Description of Artificial Sequence: Synthetic oligonucleotide
  Target: APOC3; (+) strand; PAM type: NRG; PAM sequence: TGG
ctgaagggccgtgggggacc

SEQ ID NO: 10689 - DNA, 20 bp, Artificial Sequence
  Description of Artificial Sequence: Synthetic oligonucleotide
  Target: APOC3; (+) strand; PAM type: NRG; PAM sequence: GAG
gaagggccgtgggggacctg

SEQ ID NO: 10690 - DNA, 20 bp, Artificial Sequence
  Description of Artificial Sequence: Synthetic oligonucleotide
  Target: APOC3; (+) strand; PAM type: NRG; PAM sequence: AGG
aagggccgtgggggacctgg

SEQ ID NO: 10691 - DNA, 20 bp, Artificial Sequence
  Description of Artificial Sequence: Synthetic oligonucleotide
  Target: APOC3; (+) strand; PAM type: NRG; PAM sequence: GAG
gggccgtgggggacctggag

SEQ ID NO: 10692 - DNA, 20 bp, Artificial Sequence
  Description of Artificial Sequence: Synthetic oligonucleotide
  Target: APOC3; (+) strand; PAM type: NRG; PAM sequence: AAG
ccgtgggggacctggaggag

SEQ ID NO: 10693 - DNA, 20 bp, Artificial Sequence
  Description of Artificial Sequence: Synthetic oligonucleotide
  Target: APOC3; (+) strand; PAM type: NRG; PAM sequence: AAG
tgggggacctggaggagaag

SEQ ID NO: 10694 - DNA, 20 bp, Artificial Sequence
  Description of Artificial Sequence: Synthetic oligonucleotide
  Target: APOC3; (+) strand; PAM type: NRG; PAM sequence: AGG
gggggacctggaggagaaga

SEQ ID NO: 10695 - DNA, 20 bp, Artificial Sequence
  Description of Artificial Sequence: Synthetic oligonucleotide
  Target: APOC3; (+) strand; PAM type: NRG; PAM sequence: GGG
ggggacctggaggagaagaa

SEQ ID NO: 10696 - DNA, 20 bp, Artificial Sequence
  Description of Artificial Sequence: Synthetic oligonucleotide
  Target: APOC3; (+) strand; PAM type: NRG; PAM sequence: TGG
cctggaggagaagaagggcc

SEQ ID NO: 10697 - DNA, 20 bp, Artificial Sequence
  Description of Artificial Sequence: Synthetic oligonucleotide
  Target: APOC3; (+) strand; PAM type: NRG; PAM sequence: GAG
aggagaagaagggcctggct

SEQ ID NO: 10698 - DNA, 20 bp, Artificial Sequence
  Description of Artificial Sequence: Synthetic oligonucleotide
  Target: APOC3; (+) strand; PAM type: NRG; PAM sequence: TGG
agaagaagggcctggctgag

SEQ ID NO: 10699 - DNA, 20 bp, Artificial Sequence
  Description of Artificial Sequence: Synthetic oligonucleotide
  Target: APOC3; (+) strand; PAM type: NRG; PAM sequence: GGG
gaagaagggcctggctgagt

SEQ ID NO: 10700 - DNA, 20 bp, Artificial Sequence
  Description of Artificial Sequence: Synthetic oligonucleotide
  Target: APOC3; (+) strand; PAM type: NRG; PAM sequence: GGG
aagaagggcctggctgagtg

SEQ ID NO: 10701 - DNA, 20 bp, Artificial Sequence
  Description of Artificial Sequence: Synthetic oligonucleotide
  Target: APOC3; (+) strand; PAM type: NRG; PAM sequence: CAG
ctggctgagtggggtgcctt

SEQ ID NO: 10702 - DNA, 20 bp, Artificial Sequence
  Description of Artificial Sequence: Synthetic oligonucleotide
  Target: APOC3; (+) strand; PAM type: NRG; PAM sequence: CAG
agtggggtgccttcagcatg

SEQ ID NO: 10703 - DNA, 20 bp, Artificial Sequence
  Description of Artificial Sequence: Synthetic oligonucleotide
  Target: APOC3; (+) strand; PAM type: NRG; PAM sequence: AAG
ggggtgccttcagcatgcag

SEQ ID NO: 10704 - DNA, 20 bp, Artificial Sequence
  Description of Artificial Sequence: Synthetic oligonucleotide
  Target: APOC3; (+) strand; PAM type: NRG; PAM sequence: CAG
ccgtgctcccccactcattg

SEQ ID NO: 10705 - DNA, 20 bp, Artificial Sequence
  Description of Artificial Sequence: Synthetic oligonucleotide
  Target: APOC3; (+) strand; PAM type: NRG; PAM sequence: CAG
gctcccccactcattgcagc

SEQ ID NO: 10706 - DNA, 20 bp, Artificial Sequence
  Description of Artificial Sequence: Synthetic oligonucleotide
  Target: APOC3; (+) strand; PAM type: NRG; PAM sequence: AGG
ctcccccactcattgcagcc

SEQ ID NO: 10707 - DNA, 20 bp, Artificial Sequence
  Description of Artificial Sequence: Synthetic oligonucleotide
  Target: APOC3; (+) strand; PAM type: NRG; PAM sequence: GAG
cccactcattgcagccaggt

SEQ ID NO: 10708 - DNA, 20 bp, Artificial Sequence
  Description of Artificial Sequence: Synthetic oligonucleotide
  Target: APOC3; (+) strand; PAM type: NRG; PAM sequence: AGG
ccactcattgcagccaggtg

SEQ ID NO: 10709 - DNA, 20 bp, Artificial Sequence
  Description of Artificial Sequence: Synthetic oligonucleotide
  Target: APOC3; (+) strand; PAM type: NRG; PAM sequence: GAG
actcattgcagccaggtgag

SEQ ID NO: 10710 - DNA, 20 bp, Artificial Sequence
  Description of Artificial Sequence: Synthetic oligonucleotide
  Target: APOC3; (+) strand; PAM type: NRG; PAM sequence: AAG
cattgcagccaggtgaggag

SEQ ID NO: 10711 - DNA, 20 bp, Artificial Sequence
  Description of Artificial Sequence: Synthetic oligonucleotide
  Target: APOC3; (+) strand; PAM type: NRG; PAM sequence: AGG
attgcagccaggtgaggaga

SEQ ID NO: 10712 - DNA, 20 bp, Artificial Sequence
  Description of Artificial Sequence: Synthetic oligonucleotide
  Target: APOC3; (+) strand; PAM type: NRG; PAM sequence: GGG
ttgcagccaggtgaggagaa

SEQ ID NO: 10713 - DNA, 20 bp, Artificial Sequence
  Description of Artificial Sequence: Synthetic oligonucleotide
  Target: APOC3; (+) strand; PAM type: NRG; PAM sequence: CAG
gccaggtgaggagaagggca

SEQ ID NO: 10714 - DNA, 20 bp, Artificial Sequence
  Description of Artificial Sequence: Synthetic oligonucleotide
  Target: APOC3; (+) strand; PAM type: NRG; PAM sequence: GAG
caggtgaggagaagggcaca

SEQ ID NO: 10715 - DNA, 20 bp, Artificial Sequence
  Description of Artificial Sequence: Synthetic oligonucleotide
  Target: APOC3; (+) strand; PAM type: NRG; PAM sequence: CGG
gtgaggagaagggcacagag

SEQ ID NO: 10716 - DNA, 20 bp, Artificial Sequence
  Description of Artificial Sequence: Synthetic oligonucleotide
  Target: APOC3; (+) strand; PAM type: NRG; PAM sequence: GGG
tgaggagaagggcacagagc

SEQ ID NO: 10717 - DNA, 20 bp, Artificial Sequence
  Description of Artificial Sequence: Synthetic oligonucleotide
  Target: APOC3; (+) strand; PAM type: NRG; PAM sequence: GAG
aggagaagggcacagagcgg

SEQ ID NO: 10718 - DNA, 20 bp, Artificial Sequence
  Description of Artificial Sequence: Synthetic oligonucleotide
  Target: APOC3; (+) strand; PAM type: NRG; PAM sequence: AAG
agaagggcacagagcgggag

SEQ ID NO: 10719 - DNA, 20 bp, Artificial Sequence
  Description of Artificial Sequence: Synthetic oligonucleotide
  Target: APOC3; (+) strand; PAM type: NRG; PAM sequence: CAG
cacagagcgggagaagacct

SEQ ID NO: 10720 - DNA, 20 bp, Artificial Sequence
  Description of Artificial Sequence: Synthetic oligonucleotide
  Target: APOC3; (+) strand; PAM type: NRG; PAM sequence: AGG
acagagcgggagaagacctc

SEQ ID NO: 10721 - DNA, 20 bp, Artificial Sequence
  Description of Artificial Sequence: Synthetic oligonucleotide
  Target: APOC3; (+) strand; PAM type: NRG; PAM sequence: CAG
gggagaagacctcaggtacc

SEQ ID NO: 10722 - DNA, 20 bp, Artificial Sequence
  Description of Artificial Sequence: Synthetic oligonucleotide
  Target: APOC3; (+) strand; PAM type: NRG; PAM sequence: GAG
gagaagacctcaggtaccca

SEQ ID NO: 10723 - DNA, 20 bp, Artificial Sequence
  Description of Artificial Sequence: Synthetic oligonucleotide
  Target: APOC3; (+) strand; PAM type: NRG; PAM sequence: AGG
agaagacctcaggtacccag

SEQ ID NO: 10724 - DNA, 20 bp, Artificial Sequence
  Description of Artificial Sequence: Synthetic oligonucleotide
  Target: APOC3; (+) strand; PAM type: NRG; PAM sequence: CGG
acctcaggtacccagaggcc

SEQ ID NO: 10725 - DNA, 20 bp, Artificial Sequence
  Description of Artificial Sequence: Synthetic oligonucleotide
  Target: APOC3; (+) strand; PAM type: NRG; PAM sequence: TGG
aggtacccagaggcccggcc

SEQ ID NO: 10726 - DNA, 20 bp, Artificial Sequence
  Description of Artificial Sequence: Synthetic oligonucleotide
  Target: APOC3; (+) strand; PAM type: NRG; PAM sequence: GGG
ggtacccagaggcccggcct

SEQ ID NO: 10727 - DNA, 20 bp, Artificial Sequence
  Description of Artificial Sequence: Synthetic oligonucleotide
  Target: APOC3; (+) strand; PAM type: NRG; PAM sequence: GGG
gtacccagaggcccggcctg

SEQ ID NO: 10728 - DNA, 20 bp, Artificial Sequence
  Description of Artificial Sequence: Synthetic oligonucleotide
  Target: APOC3; (+) strand; PAM type: NRG; PAM sequence: AAG
ccagaggcccggcctggggc

SEQ ID NO: 10729 - DNA, 20 bp, Artificial Sequence
  Description of Artificial Sequence: Synthetic oligonucleotide
  Target: APOC3; (+) strand; PAM type: NRG; PAM sequence: AGG
cagaggcccggcctggggca

SEQ ID NO: 10730 - DNA, 20 bp, Artificial Sequence
  Description of Artificial Sequence: Synthetic oligonucleotide
  Target: APOC3; (+) strand; PAM type: NRG; PAM sequence: GAG
tggggcaaggcctgaacctt

SEQ ID NO: 10731 - DNA, 20 bp, Artificial Sequence
  Description of Artificial Sequence: Synthetic oligonucleotide
  Target: APOC3; (+) strand; PAM type: NRG; PAM sequence: TGG
gcaaggcctgaaccttgagc

SEQ ID NO: 10732 - DNA, 20 bp, Artificial Sequence
  Description of Artificial Sequence: Synthetic oligonucleotide
  Target: APOC3; (+) strand; PAM type: NRG; PAM sequence: GGG
caaggcctgaaccttgagct

SEQ ID NO: 10733 - DNA, 20 bp, Artificial Sequence
  Description of Artificial Sequence: Synthetic oligonucleotide
  Target: APOC3; (+) strand; PAM type: NRG; PAM sequence: GGG
aaggcctgaaccttgagctg

SEQ ID NO: 10734 - DNA, 20 bp, Artificial Sequence
  Description of Artificial Sequence: Synthetic oligonucleotide
  Target: APOC3; (+) strand; PAM type: NRG; PAM sequence: GAG
ggcctgaaccttgagctggg

SEQ ID NO: 10735 - DNA, 20 bp, Artificial Sequence
  Description of Artificial Sequence: Synthetic oligonucleotide
  Target: APOC3; (+) strand; PAM type: NRG; PAM sequence: CAG
tgaaccttgagctggggagc

SEQ ID NO: 10736 - DNA, 20 bp, Artificial Sequence
  Description of Artificial Sequence: Synthetic oligonucleotide
  Target: APOC3; (+) strand; PAM type: NRG; PAM sequence: GAG
aaccttgagctggggagcca

SEQ ID NO: 10737 - DNA, 20 bp, Artificial Sequence
  Description of Artificial Sequence: Synthetic oligonucleotide
  Target: APOC3; (+) strand; PAM type: NRG; PAM sequence: CGG
agctggggagccagagtgac

SEQ ID NO: 10738 - DNA, 20 bp, Artificial Sequence
  Description of Artificial Sequence: Synthetic oligonucleotide
  Target: APOC3; (+) strand; PAM type: NRG; PAM sequence: GGG
gctggggagccagagtgacc

SEQ ID NO: 10739 - DNA, 20 bp, Artificial Sequence
  Description of Artificial Sequence: Synthetic oligonucleotide
  Target: APOC3; (+) strand; PAM type: NRG; PAM sequence: GGG
ctggggagccagagtgaccg

SEQ ID NO: 10740 - DNA, 20 bp, Artificial Sequence
  Description of Artificial Sequence: Synthetic oligonucleotide
  Target: APOC3; (+) strand; PAM type: NRG; PAM sequence: CAG
gggagccagagtgaccgggg

SEQ ID NO: 10741 - DNA, 20 bp, Artificial Sequence
  Description of Artificial Sequence: Synthetic oligonucleotide
  Target: APOC3; (+) strand; PAM type: NRG; PAM sequence: AGG
ggagccagagtgaccggggc

SEQ ID NO: 10742 - DNA, 20 bp, Artificial Sequence
  Description of Artificial Sequence: Synthetic oligonucleotide
  Target: APOC3; (+) strand; PAM type: NRG; PAM sequence: CAG
gccagagtgaccggggcagg

SEQ ID NO: 10743 - DNA, 20 bp, Artificial Sequence
  Description of Artificial Sequence: Synthetic oligonucleotide
  Target: APOC3; (+) strand; PAM type: NRG; PAM sequence: CAG
agagtgaccggggcaggcag

SEQ ID NO: 10744 - DNA, 20 bp, Artificial Sequence
  Description of Artificial Sequence: Synthetic oligonucleotide
  Target: APOC3; (+) strand; PAM type: NRG; PAM sequence: AGG
gagtgaccggggcaggcagc

SEQ ID NO: 10745 - DNA, 20 bp, Artificial Sequence
  Description of Artificial Sequence: Synthetic oligonucleotide
  Target: APOC3; (+) strand; PAM type: NRG; PAM sequence: CAG
caggacgcacctccttctcg

SEQ ID NO: 10746 - DNA, 20 bp, Artificial Sequence
  Description of Artificial Sequence: Synthetic oligonucleotide
  Target: APOC3; (+) strand; PAM type: NRG; PAM sequence: AAG
acctccttctcgcagtctct

SEQ ID NO: 10747 - DNA, 20 bp, Artificial Sequence
  Description of Artificial Sequence: Synthetic oligonucleotide
  Target: APOC3; (+) strand; PAM type: NRG; PAM sequence: CAG
tccttctcgcagtctctaag

SEQ ID NO: 10748 - DNA, 20 bp, Artificial Sequence
  Description of Artificial Sequence: Synthetic oligonucleotide
  Target: APOC3; (+) strand; PAM type: NRG; PAM sequence: CAG
tctcgcagtctctaagcagc

SEQ ID NO: 10749 - DNA, 20 bp, Artificial Sequence
  Description of Artificial Sequence: Synthetic oligonucleotide
  Target: APOC3; (+) strand; PAM type: NRG; PAM sequence: CAG
ctctaagcagccagctcttg

SEQ ID NO: 10750 - DNA, 20 bp, Artificial Sequence
  Description of Artificial Sequence: Synthetic oligonucleotide
  Target: APOC3; (+) strand; PAM type: NRG; PAM sequence: AGG
tctaagcagccagctcttgc

SEQ ID NO: 10751 - DNA, 20 bp, Artificial Sequence
  Description of Artificial Sequence: Synthetic oligonucleotide
  Target: APOC3; (+) strand; PAM type: NRG; PAM sequence: GGG
ctaagcagccagctcttgca

SEQ ID NO: 10752 - DNA, 20 bp, Artificial Sequence
  Description of Artificial Sequence: Synthetic oligonucleotide
  Target: APOC3; (+) strand; PAM type: NRG; PAM sequence: CAG
gcagggcctatttatgtctg

SEQ ID NO: 10753 - DNA, 20 bp, Artificial Sequence
  Description of Artificial Sequence: Synthetic oligonucleotide
  Target: APOC3; (+) strand; PAM type: NRG; PAM sequence: CAG
ggcctatttatgtctgcagc

SEQ ID NO: 10754 - DNA, 20 bp, Artificial Sequence
  Description of Artificial Sequence: Synthetic oligonucleotide
  Target: APOC3; (+) strand; PAM type: NRG; PAM sequence: AGG
gcctatttatgtctgcagcc

SEQ ID NO: 10755 - DNA, 20 bp, Artificial Sequence
  Description of Artificial Sequence: Synthetic oligonucleotide
  Target: APOC3; (+) strand; PAM type: NRG; PAM sequence: GGG
cctatttatgtctgcagcca

SEQ ID NO: 10756 - DNA, 20 bp, Artificial Sequence
  Description of Artificial Sequence: Synthetic oligonucleotide
  Target: APOC3; (+) strand; PAM type: NRG; PAM sequence: TGG
ttatgtctgcagccagggtc

SEQ ID NO: 10757 - DNA, 20 bp, Artificial Sequence
  Description of Artificial Sequence: Synthetic oligonucleotide
  Target: APOC3; (+) strand; PAM type: NRG; PAM sequence: GGG
tatgtctgcagccagggtct

SEQ ID NO: 10758 - DNA, 20 bp, Artificial Sequence
  Description of Artificial Sequence: Synthetic oligonucleotide
  Target: APOC3; (+) strand; PAM type: NRG; PAM sequence: TGG
tctgcagccagggtctgggc

SEQ ID NO: 10759 - DNA, 20 bp, Artificial Sequence
  Description of Artificial Sequence: Synthetic oligonucleotide
  Target: APOC3; (+) strand; PAM type: NRG; PAM sequence: GGG
ctgcagccagggtctgggct

SEQ ID NO: 10760 - DNA, 20 bp, Artificial Sequence
  Description of Artificial Sequence: Synthetic oligonucleotide
  Target: APOC3; (+) strand; PAM type: NRG; PAM sequence: GAG
gcagccagggtctgggctgg

SEQ ID NO: 10761 - DNA, 20 bp, Artificial Sequence
  Description of Artificial Sequence: Synthetic oligonucleotide
  Target: APOC3; (+) strand; PAM type: NRG; PAM sequence: AGG
cagccagggtctgggctggg

SEQ ID NO: 10762 - DNA, 20 bp, Artificial Sequence
  Description of Artificial Sequence: Synthetic oligonucleotide
  Target: APOC3; (+) strand; PAM type: NRG; PAM sequence: AAG
gtctgggctgggaggctgat

SEQ ID NO: 10763 - DNA, 20 bp, Artificial Sequence
  Description of Artificial Sequence: Synthetic oligonucleotide
  Target: APOC3; (+) strand; PAM type: NRG; PAM sequence: CAG
ggctgggaggctgataagcc

SEQ ID NO: 10764 - DNA, 20 bp, Artificial Sequence
  Description of Artificial Sequence: Synthetic oligonucleotide
  Target: APOC3; (+) strand; PAM type: NRG; PAM sequence: CGG
gaggctgataagcccagccc

SEQ ID NO: 10765 - DNA, 20 bp, Artificial Sequence
  Description of Artificial Sequence: Synthetic oligonucleotide
  Target: APOC3; (+) strand; PAM type: NRG; PAM sequence: TGG
ccggccctgttgctgctcac

SEQ ID NO: 10766 - DNA, 20 bp, Artificial Sequence
  Description of Artificial Sequence: Synthetic oligonucleotide
  Target: APOC3; (+) strand; PAM type: NRG; PAM sequence: TGG
ctgttgctgctcactggtcc

SEQ ID NO: 10767 - DNA, 20 bp, Artificial Sequence
  Description of Artificial Sequence: Synthetic oligonucleotide
  Target: APOC3; (+) strand; PAM type: NRG; PAM sequence: TGG
gctcactggtcctggcaatg

SEQ ID NO: 10768 - DNA, 20 bp, Artificial Sequence
  Description of Artificial Sequence: Synthetic oligonucleotide
  Target: APOC3; (+) strand; PAM type: NRG; PAM sequence: AAG
gtcctggcaatgtggaactt

SEQ ID NO: 10769 - DNA, 20 bp, Artificial Sequence
  Description of Artificial Sequence: Synthetic oligonucleotide
  Target: APOC3; (+) strand; PAM type: NRG; PAM sequence: GAG
cctggcaatgtggaacttaa

SEQ ID NO: 10770 - DNA, 20 bp, Artificial Sequence
  Description of Artificial Sequence: Synthetic oligonucleotide
  Target: APOC3; (+) strand; PAM type: NRG; PAM sequence: AAG
aatgtggaacttaagagttc

SEQ ID NO: 10771 - DNA, 20 bp, Artificial Sequence
  Description of Artificial Sequence: Synthetic oligonucleotide
  Target: APOC3; (+) strand; PAM type: NRG; PAM sequence: AGG
atgtggaacttaagagttca

SEQ ID NO: 10772 - DNA, 20 bp, Artificial Sequence
  Description of Artificial Sequence: Synthetic oligonucleotide
  Target: APOC3; (+) strand; PAM type: NRG; PAM sequence: CAG
gaacttaagagttcaaggat

SEQ ID NO: 10773 - DNA, 20 bp, Artificial Sequence
  Description of Artificial Sequence: Synthetic oligonucleotide
  Target: APOC3; (+) strand; PAM type: NRG; PAM sequence: TGG
tcaaggatcagctctgtccc

SEQ ID NO: 10774 - DNA, 20 bp, Artificial Sequence
  Description of Artificial Sequence: Synthetic oligonucleotide
  Target: APOC3; (+) strand; PAM type: NRG; PAM sequence: GGG
caaggatcagctctgtccct

SEQ ID NO: 10775 - DNA, 20 bp, Artificial Sequence
  Description of Artificial Sequence: Synthetic oligonucleotide
  Target: APOC3; (+) strand; PAM type: NRG; PAM sequence: GGG
aaggatcagctctgtccctg

SEQ ID NO: 10776 - DNA, 20 bp, Artificial Sequence
  Description of Artificial Sequence: Synthetic oligonucleotide
  Target: APOC3; (+) strand; PAM type: NRG; PAM sequence: TGG
atcagctctgtccctggggc

SEQ ID NO: 10777 - DNA, 20 bp, Artificial Sequence
  Description of Artificial Sequence: Synthetic oligonucleotide
  Target: APOC3; (+) strand; PAM type: NRG; PAM sequence: GGG
tcagctctgtccctggggct

SEQ ID NO: 10778 - DNA, 20 bp, Artificial Sequence
  Description of Artificial Sequence: Synthetic oligonucleotide
  Target: APOC3; (+) strand; PAM type: NRG; PAM sequence: TAG
tgtccctggggctgggcaaa

SEQ ID NO: 10779 - DNA, 20 bp, Artificial Sequence
  Description of Artificial Sequence: Synthetic oligonucleotide
  Target: APOC3; (+) strand; PAM type: NRG; PAM sequence: GAG
tccctggggctgggcaaata

SEQ ID NO: 10780 - DNA, 20 bp, Artificial Sequence
  Description of Artificial Sequence: Synthetic oligonucleotide
  Target: APOC3; (+) strand; PAM type: NRG; PAM sequence: TGG
ctggggctgggcaaatagag

SEQ ID NO: 10781 - DNA, 20 bp, Artificial Sequence
  Description of Artificial Sequence: Synthetic oligonucleotide
  Target: APOC3; (+) strand; PAM type: NRG; PAM sequence: GGG
tggggctgggcaaatagagt

SEQ ID NO: 10782 - DNA, 20 bp, Artificial Sequence
  Description of Artificial Sequence: Synthetic oligonucleotide
  Target: APOC3; (+) strand; PAM type: NRG; PAM sequence: CAG
gggcaaatagagtgggcaaa

SEQ ID NO: 10783 - DNA, 20 bp, Artificial Sequence
  Description of Artificial Sequence: Synthetic oligonucleotide
  Target: APOC3; (+) strand; PAM type: NRG; PAM sequence: AAG
aaatagagtgggcaaacagc

SEQ ID NO: 10784 - DNA, 20 bp, Artificial Sequence
  Description of Artificial Sequence: Synthetic oligonucleotide
  Target: APOC3; (+) strand; PAM type: NRG; PAM sequence: CGG
agtgggcaaacagcaagctg

SEQ ID NO: 10785 - DNA, 20 bp, Artificial Sequence
  Description of Artificial Sequence: Synthetic oligonucleotide
  Target: APOC3; (+) strand; PAM type: NRG; PAM sequence: GGG
gtgggcaaacagcaagctgc

SEQ ID NO: 10786 - DNA, 20 bp, Artificial Sequence
  Description of Artificial Sequence: Synthetic oligonucleotide
  Target: APOC3; (+) strand; PAM type: NRG; PAM sequence: GGG
tgggcaaacagcaagctgcg

SEQ ID NO: 10787 - DNA, 20 bp, Artificial Sequence
  Description of Artificial Sequence: Synthetic oligonucleotide
  Target: APOC3; (+) strand; PAM type: NRG; PAM sequence: GGG
gggcaaacagcaagctgcgg

SEQ ID NO: 10788 - DNA, 20 bp, Artificial Sequence
  Description of Artificial Sequence: Synthetic oligonucleotide
  Target: APOC3; (+) strand; PAM type: NRG; PAM sequence: CAG
acagcaagctgcgggggctg

SEQ ID NO: 10789 - DNA, 20 bp, Artificial Sequence
  Description of Artificial Sequence: Synthetic oligonucleotide
  Target: APOC3; (+) strand; PAM type: NRG; PAM sequence: AGG
cagcaagctgcgggggctgc

SEQ ID NO: 10790 - DNA, 20 bp, Artificial Sequence
  Description of Artificial Sequence: Synthetic oligonucleotide
  Target: APOC3; (+) strand; PAM type: NRG; PAM sequence: GGG
agcaagctgcgggggctgca

SEQ ID NO: 10791 - DNA, 20 bp, Artificial Sequence
  Description of Artificial Sequence: Synthetic oligonucleotide
  Target: APOC3; (+) strand; PAM type: NRG; PAM sequence: CAG
aagctgcgggggctgcaggg

SEQ ID NO: 10792 - DNA, 20 bp, Artificial Sequence
  Description of Artificial Sequence: Synthetic oligonucleotide
  Target: APOC3; (+) strand; PAM type: NRG; PAM sequence: AGG
agctgcgggggctgcagggc

SEQ ID NO: 10793 - DNA, 20 bp, Artificial Sequence
  Description of Artificial Sequence: Synthetic oligonucleotide
  Target: APOC3; (+) strand; PAM type: NRG; PAM sequence: GGG
gctgcgggggctgcagggca

SEQ ID NO: 10794 - DNA, 20 bp, Artificial Sequence
  Description of Artificial Sequence: Synthetic oligonucleotide
  Target: APOC3; (+) strand; PAM type: NRG; PAM sequence: GGG
ctgcgggggctgcagggcag

SEQ ID NO: 10795 - DNA, 20 bp, Artificial Sequence
  Description of Artificial Sequence: Synthetic oligonucleotide
  Target: APOC3; (+) strand; PAM type: NRG; PAM sequence: AAG
ggggctgcagggcaggggtc

SEQ ID NO: 10796 - DNA, 20 bp, Artificial Sequence
  Description of Artificial Sequence: Synthetic oligonucleotide
  Target: APOC3; (+) strand; PAM type: NRG; PAM sequence: AGG
gggctgcagggcaggggtca

SEQ ID NO: 10797 - DNA, 20 bp, Artificial Sequence
  Description of Artificial Sequence: Synthetic oligonucleotide
  Target: APOC3; (+) strand; PAM type: NRG; PAM sequence: GGG
ggctgcagggcaggggtcaa

SEQ ID NO: 10798 - DNA, 20 bp, Artificial Sequence
  Description of Artificial Sequence: Synthetic oligonucleotide
  Target: APOC3; (+) strand; PAM type: NRG; PAM sequence: CAG
cagggcaggggtcaagggtt

SEQ ID NO: 10799 - DNA, 20 bp, Artificial Sequence
  Description of Artificial Sequence: Synthetic oligonucleotide
  Target: APOC3; (+) strand; PAM type: NRG; PAM sequence: TGG
ggcaggggtcaagggttcag

SEQ ID NO: 10800 - DNA, 20 bp, Artificial Sequence
  Description of Artificial Sequence: Synthetic oligonucleotide
  Target: APOC3; (+) strand; PAM type: NRG; PAM sequence: GGG
gcaggggtcaagggttcagt

SEQ ID NO: 10801 - DNA, 20 bp, Artificial Sequence
  Description of Artificial Sequence: Synthetic oligonucleotide
  Target: APOC3; (+) strand; PAM type: NRG; PAM sequence: GGG
caggggtcaagggttcagtg

SEQ ID NO: 10802 - DNA, 20 bp, Artificial Sequence
  Description of Artificial Sequence: Synthetic oligonucleotide
  Target: APOC3; (+) strand; PAM type: NRG; PAM sequence: GGG
aggggtcaagggttcagtgg

SEQ ID NO: 10803 - DNA, 20 bp, Artificial Sequence
  Description of Artificial Sequence: Synthetic oligonucleotide
  Target: APOC3; (+) strand; PAM type: NRG; PAM sequence: CGG
ggtcaagggttcagtggggg

SEQ ID NO: 10804 - DNA, 20 bp, Artificial Sequence
  Description of Artificial Sequence: Synthetic oligonucleotide
  Target: APOC3; (+) strand; PAM type: NRG; PAM sequence: GGG
gtcaagggttcagtgggggc

SEQ ID NO: 10805 - DNA, 20 bp, Artificial Sequence
  Description of Artificial Sequence: Synthetic oligonucleotide
  Target: APOC3; (+) strand; PAM type: NRG; PAM sequence: GAG
caagggttcagtgggggcgg

SEQ ID NO: 10806 - DNA, 20 bp, Artificial Sequence
  Description of Artificial Sequence: Synthetic oligonucleotide
  Target: APOC3; (+) strand; PAM type: NRG; PAM sequence: AGG
aagggttcagtgggggcggg

SEQ ID NO: 10807 - DNA, 20 bp, Artificial Sequence
  Description of Artificial Sequence: Synthetic oligonucleotide
  Target: APOC3; (+) strand; PAM type: NRG; PAM sequence: GGG
agggttcagtgggggcggga

SEQ ID NO: 10808 - DNA, 20 bp, Artificial Sequence
  Description of Artificial Sequence: Synthetic oligonucleotide
  Target: APOC3; (+) strand; PAM type: NRG; PAM sequence: GGG
gggttcagtgggggcgggag

SEQ ID NO: 10809 - DNA, 20 bp, Artificial Sequence
  Description of Artificial Sequence: Synthetic oligonucleotide
  Target: APOC3; (+) strand; PAM type: NRG; PAM sequence: GAG
gttcagtgggggcgggaggg

SEQ ID NO: 10810 - DNA, 20 bp, Artificial Sequence
  Description of Artificial Sequence: Synthetic oligonucleotide
  Target: APOC3; (+) strand; PAM type: NRG; PAM sequence: CAG
gggcgggaggggagtgtctg

SEQ ID NO: 10811 - DNA, 20 bp, Artificial Sequence
  Description of Artificial Sequence: Synthetic oligonucleotide
  Target: APOC3; (+) strand; PAM type: NRG; PAM sequence: AGG
ggcgggaggggagtgtctgc

SEQ ID NO: 10812 - DNA, 20 bp, Artificial Sequence
  Description of Artificial Sequence: Synthetic oligonucleotide
  Target: APOC3; (+) strand; PAM type: NRG; PAM sequence: CAG
ggggagtgtctgcaggcttg

SEQ ID NO: 10813 - DNA, 20 bp, Artificial Sequence
  Description of Artificial Sequence: Synthetic oligonucleotide
  Target: APOC3; (+) strand; PAM type: NRG; PAM sequence: AGG
gggagtgtctgcaggcttgc

SEQ ID NO: 10814 - DNA, 20 bp, Artificial Sequence
  Description of Artificial Sequence: Synthetic oligonucleotide
  Target: APOC3; (+) strand; PAM type: NRG; PAM sequence: CGG
ctgcaggcttgcaggtctcc

SEQ ID NO: 10815 - DNA, 20 bp, Artificial Sequence
  Description of Artificial Sequence: Synthetic oligonucleotide
  Target: APOC3; (+) strand; PAM type: NRG; PAM sequence: GGG
tgcaggcttgcaggtctccc

SEQ ID NO: 10816 - DNA, 20 bp, Artificial Sequence
  Description of Artificial Sequence: Synthetic oligonucleotide
  Target: APOC3; (+) strand; PAM type: NRG; PAM sequence: TGG
aggcttgcaggtctcccggg

SEQ ID NO: 10817 - DNA, 20 bp, Artificial Sequence
  Description of Artificial Sequence: Synthetic oligonucleotide
  Target: APOC3; (+) strand; PAM type: NRG; PAM sequence: GGG
ggcttgcaggtctcccgggt

SEQ ID NO: 10818 - DNA, 20 bp, Artificial Sequence
  Description of Artificial Sequence: Synthetic oligonucleotide
  Target: APOC3; (+) strand; PAM type: NRG; PAM sequence: GGG
gcttgcaggtctcccgggtg

SEQ ID NO: 10819 - DNA, 20 bp, Artificial Sequence
  Description of Artificial Sequence: Synthetic oligonucleotide
  Target: APOC3; (+) strand; PAM type: NRG; PAM sequence: CGG
gcaggtctcccgggtggggt

SEQ ID NO: 10820 - DNA, 20 bp, Artificial Sequence
  Description of Artificial Sequence: Synthetic oligonucleotide
  Target: APOC3; (+) strand; PAM type: NRG; PAM sequence: GGG
caggtctcccgggtggggtc

SEQ ID NO: 10821 - DNA, 20 bp, Artificial Sequence
  Description of Artificial Sequence: Synthetic oligonucleotide
  Target: APOC3; (+) strand; PAM type: NRG; PAM sequence: GGG
aggtctcccgggtggggtcg

SEQ ID NO: 10822 - DNA, 20 bp, Artificial Sequence
  Description of Artificial Sequence: Synthetic oligonucleotide
  Target: APOC3; (+) strand; PAM type: NRG; PAM sequence: TGG
actcatccccttcccctcca

SEQ ID NO: 10823 - DNA, 20 bp, Artificial Sequence
  Description of Artificial Sequence: Synthetic oligonucleotide
  Target: APOC3; (+) strand; PAM type: NRG; PAM sequence: GGG
ctcatccccttcccctccat

SEQ ID NO: 10824 - DNA, 20 bp, Artificial Sequence
  Description of Artificial Sequence: Synthetic oligonucleotide
  Target: APOC3; (+) strand; PAM type: NRG; PAM sequence: GAG
catccccttcccctccatgg

SEQ ID NO: 10825 - DNA, 20 bp, Artificial Sequence
  Description of Artificial Sequence: Synthetic oligonucleotide
  Target: APOC3; (+) strand; PAM type: NRG; PAM sequence: TGG
ttcccctccatgggagtgtg

SEQ ID NO: 10826 - DNA, 20 bp, Artificial Sequence
  Description of Artificial Sequence: Synthetic oligonucleotide
  Target: APOC3; (+) strand; PAM type: NRG; PAM sequence: GGG
tcccctccatgggagtgtgt

SEQ ID NO: 10827 - DNA, 20 bp, Artificial Sequence
  Description of Artificial Sequence: Synthetic oligonucleotide
  Target: APOC3; (+) strand; PAM type: NRG; PAM sequence: CAG
cctccatgggagtgtgtggg

SEQ ID NO: 10828 - DNA, 20 bp, Artificial Sequence
  Description of Artificial Sequence: Synthetic oligonucleotide
  Target: APOC3; (+) strand; PAM type: NRG; PAM sequence: TGG
gttgccattgtccattgtgt

SEQ ID NO: 10829 - DNA, 20 bp, Artificial Sequence
  Description of Artificial Sequence: Synthetic oligonucleotide
  Target: APOC3; (+) strand; PAM type: NRG; PAM sequence: CAG
gccattgtccattgtgttgg

SEQ ID NO: 10830 - DNA, 20 bp, Artificial Sequence
  Description of Artificial Sequence: Synthetic oligonucleotide
  Target: APOC3; (+) strand; PAM type: NRG; PAM sequence: GAG
cattgtccattgtgttggca

SEQ ID NO: 10831 - DNA, 20 bp, Artificial Sequence
  Description of Artificial Sequence: Synthetic oligonucleotide
  Target: APOC3; (+) strand; PAM type: NRG; PAM sequence: AGG
attgtccattgtgttggcag

SEQ ID NO: 10832 - DNA, 20 bp, Artificial Sequence
  Description of Artificial Sequence: Synthetic oligonucleotide
  Target: APOC3; (+) strand; PAM type: NRG; PAM sequence: GAG
tgtccattgtgttggcagag

SEQ ID NO: 10833 - DNA, 20 bp, Artificial Sequence
  Description of Artificial Sequence: Synthetic oligonucleotide
  Target: APOC3; (+) strand; PAM type: NRG; PAM sequence: AGG
gtccattgtgttggcagagg

SEQ ID NO: 10834 - DNA, 20 bp, Artificial Sequence
  Description of Artificial Sequence: Synthetic oligonucleotide
  Target: APOC3; (+) strand; PAM type: NRG; PAM sequence: GGG
tccattgtgttggcagagga

SEQ ID NO: 10835 - DNA, 20 bp, Artificial Sequence
  Description of Artificial Sequence: Synthetic oligonucleotide
  Target: APOC3; (+) strand; PAM type: NRG; PAM sequence: GGG
ccattgtgttggcagaggag

SEQ ID NO: 10836 - DNA, 20 bp, Artificial Sequence
  Description of Artificial Sequence: Synthetic oligonucleotide
  Target: APOC3; (+) strand; PAM type: NRG; PAM sequence: GAG
attgtgttggcagaggaggg

SEQ ID NO: 10837 - DNA, 20 bp, Artificial Sequence
  Description of Artificial Sequence: Synthetic oligonucleotide
  Target: APOC3; (+) strand; PAM type: NRG; PAM sequence: AGG
ttgtgttggcagaggagggg

SEQ ID NO: 10838 - DNA, 20 bp, Artificial Sequence
  Description of Artificial Sequence: Synthetic oligonucleotide
  Target: APOC3; (+) strand; PAM type: NRG; PAM sequence: GGG
tgtgttggcagaggagggga

SEQ ID NO: 10839 - DNA, 20 bp, Artificial Sequence
  Description of Artificial Sequence: Synthetic oligonucleotide
  Target: APOC3; (+) strand; PAM type: NRG; PAM sequence: GGG
gtgttggcagaggaggggag

SEQ ID NO: 10840 - DNA, 20 bp, Artificial Sequence
  Description of Artificial Sequence: Synthetic oligonucleotide
  Target: APOC3; (+) strand; PAM type: NRG; PAM sequence: GAG
gttggcagaggaggggaggg

SEQ ID NO: 10841 - DNA, 20 bp, Artificial Sequence
  Description of Artificial Sequence: Synthetic oligonucleotide
  Target: APOC3; (+) strand; PAM type: NRG; PAM sequence: AGG
ttggcagaggaggggagggg

SEQ ID NO: 10842 - DNA, 20 bp, Artificial Sequence
  Description of Artificial Sequence: Synthetic oligonucleotide
  Target: APOC3; (+) strand; PAM type: NRG; PAM sequence: GGG
tggcagaggaggggagggga

SEQ ID NO: 10843 - DNA, 20 bp, Artificial Sequence
  Description of Artificial Sequence: Synthetic oligonucleotide
  Target: APOC3; (+) strand; PAM type: NRG; PAM sequence: TGG
ggaggggaggggagggacgc

SEQ ID NO: 10844 - DNA, 20 bp, Artificial Sequence
  Description of Artificial Sequence: Synthetic oligonucleotide
  Target: APOC3; (+) strand; PAM type: NRG; PAM sequence: GGG
gaggggaggggagggacgct

SEQ ID NO: 10845 - DNA, 20 bp, Artificial Sequence
  Description of Artificial Sequence: Synthetic oligonucleotide
  Target: APOC3; (+) strand; PAM type: NRG; PAM sequence: AAG
gacgctgggactcctccacc

SEQ ID NO: 10846 - DNA, 20 bp, Artificial Sequence
  Description of Artificial Sequence: Synthetic oligonucleotide
  Target: APOC3; (+) strand; PAM type: NRG; PAM sequence: AGG
acgctgggactcctccacca

SEQ ID NO: 10847 - DNA, 20 bp, Artificial Sequence
  Description of Artificial Sequence: Synthetic oligonucleotide
  Target: APOC3; (+) strand; PAM type: NRG; PAM sequence: GAG
gctgggactcctccaccaag

SEQ ID NO: 10848 - DNA, 20 bp, Artificial Sequence
  Description of Artificial Sequence: Synthetic oligonucleotide
  Target: APOC3; (+) strand; PAM type: NRG; PAM sequence: CAG
gagactgcctcccccaccac

SEQ ID NO: 10849 - DNA, 20 bp, Artificial Sequence
  Description of Artificial Sequence: Synthetic oligonucleotide
  Target: APOC3; (+) strand; PAM type: NRG; PAM sequence: CAG
ctcccccaccaccagcattc

SEQ ID NO: 10850 - DNA, 20 bp, Artificial Sequence
  Description of Artificial Sequence: Synthetic oligonucleotide
  Target: APOC3; (+) strand; PAM type: NRG; PAM sequence: AGG
tcccccaccaccagcattcc

SEQ ID NO: 10851 - DNA, 20 bp, Artificial Sequence
  Description of Artificial Sequence: Synthetic oligonucleotide
  Target: APOC3; (+) strand; PAM type: NRG; PAM sequence: GGG
cccccaccaccagcattcca

SEQ ID NO: 10852 - DNA, 20 bp, Artificial Sequence
  Description of Artificial Sequence: Synthetic oligonucleotide
  Target: APOC3; (+) strand; PAM type: NRG; PAM sequence: GAG
cccaccaccagcattccagg

SEQ ID NO: 10853 - DNA, 20 bp, Artificial Sequence
  Description of Artificial Sequence: Synthetic oligonucleotide
  Target: APOC3; (-) strand; PAM type: YTN; PAM sequence: CTG
aggcaggagaatggcgtgaa

SEQ ID NO: 10854 - DNA, 20 bp, Artificial Sequence
  Description of Artificial Sequence: Synthetic oligonucleotide
  Target: APOC3; (-) strand; PAM type: YTN; PAM sequence: TTG
ggaggctgaggcaggagaat

SEQ ID NO: 10855 - DNA, 20 bp, Artificial Sequence
  Description of Artificial Sequence: Synthetic oligonucleotide
  Target: APOC3; (-) strand; PAM type: YTN; PAM sequence: CTT
gggaggctgaggcaggagaa

SEQ ID NO: 10856 - DNA, 20 bp, Artificial Sequence
  Description of Artificial Sequence: Synthetic oligonucleotide
  Target: APOC3; (-) strand; PAM type: YTN; PAM sequence: CTA
cttgggaggctgaggcagga

SEQ ID NO: 10857 - DNA, 20 bp, Artificial Sequence
  Description of Artificial Sequence: Synthetic oligonucleotide
  Target: APOC3; (-) strand; PAM type: YTN; PAM sequence: CTA
tggtcccagctacttgggag

SEQ ID NO: 10858 - DNA, 20 bp, Artificial Sequence
  Description of Artificial Sequence: Synthetic oligonucleotide
  Target: APOC3; (-) strand; PAM type: YTN; PAM sequence: TTA
gccgggcgtggtggcgggcg

SEQ ID NO: 10859 - DNA, 20 bp, Artificial Sequence
  Description of Artificial Sequence: Synthetic oligonucleotide
  Target: APOC3; (-) strand; PAM type: YTN; PAM sequence: CTA
aaaatacaaaaaaaaaaaaa

SEQ ID NO: 10860 - DNA, 20 bp, Artificial Sequence
  Description of Artificial Sequence: Synthetic oligonucleotide
  Target: APOC3; (-) strand; PAM type: YTN; PAM sequence: CTA
ctaaaaatacaaaaaaaaaa

SEQ ID NO: 10861 - DNA, 20 bp, Artificial Sequence
  Description of Artificial Sequence: Synthetic oligonucleotide
  Target: APOC3; (-) strand; PAM type: YTN; PAM sequence: CTC
tactaaaaatacaaaaaaaa

SEQ ID NO: 10862 - DNA, 20 bp, Artificial Sequence
  Description of Artificial Sequence: Synthetic oligonucleotide
  Target: APOC3; (-) strand; PAM type: YTN; PAM sequence: CTA
acacggcgaaaccccatctc

SEQ ID NO: 10863 - DNA, 20 bp, Artificial Sequence
  Description of Artificial Sequence: Synthetic oligonucleotide
  Target: APOC3; (-) strand; PAM type: YTN; PAM sequence: CTG
gctaacacggcgaaacccca

SEQ ID NO: 10864 - DNA, 20 bp, Artificial Sequence
  Description of Artificial Sequence: Synthetic oligonucleotide
  Target: APOC3; (-) strand; PAM type: YTN; PAM sequence: TTG
aggcgggcggatcacgaggt

SEQ ID NO: 10865 - DNA, 20 bp, Artificial Sequence
  Description of Artificial Sequence: Synthetic oligonucleotide
  Target: APOC3; (-) strand; PAM type: YTN; PAM sequence: TTG
ggaggttgaggcgggcggat

SEQ ID NO: 10866 - DNA, 20 bp, Artificial Sequence
  Description of Artificial Sequence: Synthetic oligonucleotide
  Target: APOC3; (-) strand; PAM type: YTN; PAM sequence: TTT
gggaggttgaggcgggcgga

SEQ ID NO: 10867 - DNA, 20 bp, Artificial Sequence
  Description of Artificial Sequence: Synthetic oligonucleotide
  Target: APOC3; (-) strand; PAM type: YTN; PAM sequence: CTT
tgggaggttgaggcgggcgg

SEQ ID NO: 10868 - DNA, 20 bp, Artificial Sequence
  Description of Artificial Sequence: Synthetic oligonucleotide
  Target: APOC3; (-) strand; PAM type: YTN; PAM sequence: CTC
agcactttgggaggttgagg

SEQ ID NO: 10869 - DNA, 20 bp, Artificial Sequence
  Description of Artificial Sequence: Synthetic oligonucleotide
  Target: APOC3; (-) strand; PAM type: YTN; PAM sequence: CTG
taatctcagcactttgggag

SEQ ID NO: 10870 - DNA, 20 bp, Artificial Sequence
  Description of Artificial Sequence: Synthetic oligonucleotide
  Target: APOC3; (-) strand; PAM type: YTN; PAM sequence: CTC
acgcctgtaatctcagcact

SEQ ID NO: 10871 - DNA, 20 bp, Artificial Sequence
  Description of Artificial Sequence: Synthetic oligonucleotide
  Target: APOC3; (-) strand; PAM type: YTN; PAM sequence: TTA
ggccgggcgtggtggctcac

SEQ ID NO: 10872 - DNA, 20 bp, Artificial Sequence
  Description of Artificial Sequence: Synthetic oligonucleotide
  Target: APOC3; (-) strand; PAM type: YTN; PAM sequence: TTT
aggccgggcgtggtggctca

SEQ ID NO: 10873 - DNA, 20 bp, Artificial Sequence
  Description of Artificial Sequence: Synthetic oligonucleotide
  Target: APOC3; (-) strand; PAM type: YTN; PAM sequence: TTT
taggccgggcgtggtggctc

SEQ ID NO: 10874 - DNA, 20 bp, Artificial Sequence
  Description of Artificial Sequence: Synthetic oligonucleotide
  Target: APOC3; (-) strand; PAM type: YTN; PAM sequence: TTT
ttaggccgggcgtggtggct

SEQ ID NO: 10875 - DNA, 20 bp, Artificial Sequence
  Description of Artificial Sequence: Synthetic oligonucleotide
  Target: APOC3; (-) strand; PAM type: YTN; PAM sequence: TTT
tttaggccgggcgtggtggc

SEQ ID NO: 10876 - DNA, 20 bp, Artificial Sequence
  Description of Artificial Sequence: Synthetic oligonucleotide
  Target: APOC3; (-) strand; PAM type: YTN; PAM sequence: TTG
aaaataattttttaggccgg

SEQ ID NO: 10877 - DNA, 20 bp, Artificial Sequence
  Description of Artificial Sequence: Synthetic oligonucleotide
  Target: APOC3; (-) strand; PAM type: YTN; PAM sequence: TTG
gattgaaaataattttttag

SEQ ID NO: 10878 - DNA, 20 bp, Artificial Sequence
  Description of Artificial Sequence: Synthetic oligonucleotide
  Target: APOC3; (-) strand; PAM type: YTN; PAM sequence: CTT
ggattgaaaataatttttta

SEQ ID NO: 10879 - DNA, 20 bp, Artificial Sequence
  Description of Artificial Sequence: Synthetic oligonucleotide
  Target: APOC3; (-) strand; PAM type: YTN; PAM sequence: TTC
aaccaaccttggattgaaaa

SEQ ID NO: 10880 - DNA, 20 bp, Artificial Sequence
  Description of Artificial Sequence: Synthetic oligonucleotide
  Target: APOC3; (-) strand; PAM type: YTN; PAM sequence: CTG
tgtccatggattcaaccaac

SEQ ID NO: 10881 - DNA, 20 bp, Artificial Sequence
  Description of Artificial Sequence: Synthetic oligonucleotide
  Target: APOC3; (-) strand; PAM type: YTN; PAM sequence: TTC
tgtgtccatggattcaacca

SEQ ID NO: 10882 - DNA, 20 bp, Artificial Sequence
  Description of Artificial Sequence: Synthetic oligonucleotide
  Target: APOC3; (-) strand; PAM type: YTN; PAM sequence: TTT
ctgtgtccatggattcaacc

SEQ ID NO: 10883 - DNA, 20 bp, Artificial Sequence
  Description of Artificial Sequence: Synthetic oligonucleotide
  Target: APOC3; (-) strand; PAM type: YTN; PAM sequence: TTG
gtttctgtgtccatggattc

SEQ ID NO: 10884 - DNA, 20 bp, Artificial Sequence
  Description of Artificial Sequence: Synthetic oligonucleotide
  Target: APOC3; (-) strand; PAM type: YTN; PAM sequence: CTT
ggtttctgtgtccatggatt

SEQ ID NO: 10885 - DNA, 20 bp, Artificial Sequence
  Description of Artificial Sequence: Synthetic oligonucleotide
  Target: APOC3; (-) strand; PAM type: YTN; PAM sequence: CTG
tatccttggtttctgtgtcc

SEQ ID NO: 10886 - DNA, 20 bp, Artificial Sequence
  Description of Artificial Sequence: Synthetic oligonucleotide
  Target: APOC3; (-) strand; PAM type: YTN; PAM sequence: CTC
tgtatccttggtttctgtgt

SEQ ID NO: 10887 - DNA, 20 bp, Artificial Sequence
  Description of Artificial Sequence: Synthetic oligonucleotide
  Target: APOC3; (-) strand; PAM type: YTN; PAM sequence: CTA
taggcagccctctgtatcct

SEQ ID NO: 10888 - DNA, 20 bp, Artificial Sequence
  Description of Artificial Sequence: Synthetic oligonucleotide
  Target: APOC3; (-) strand; PAM type: YTN; PAM sequence: CTC
tataggcagccctctgtatc

SEQ ID NO: 10889 - DNA, 20 bp, Artificial Sequence
  Description of Artificial Sequence: Synthetic oligonucleotide
  Target: APOC3; (-) strand; PAM type: YTN; PAM sequence: CTG
tgccaggagctctataggca

SEQ ID NO: 10890 - DNA, 20 bp, Artificial Sequence
  Description of Artificial Sequence: Synthetic oligonucleotide
  Target: APOC3; (-) strand; PAM type: YTN; PAM sequence: CTC
tgtgccaggagctctatagg

SEQ ID NO: 10891 - DNA, 20 bp, Artificial Sequence
  Description of Artificial Sequence: Synthetic oligonucleotide
  Target: APOC3; (-) strand; PAM type: YTN; PAM sequence: TTA
ctctgtgccaggagctctat

SEQ ID NO: 10892 - DNA, 20 bp, Artificial Sequence
  Description of Artificial Sequence: Synthetic oligonucleotide
  Target: APOC3; (-) strand; PAM type: YTN; PAM sequence: CTT
actctgtgccaggagctcta

SEQ ID NO: 10893 - DNA, 20 bp, Artificial Sequence
  Description of Artificial Sequence: Synthetic oligonucleotide
  Target: APOC3; (-) strand; PAM type: YTN; PAM sequence: TTC
agagcttactctgtgccagg

SEQ ID NO: 10894 - DNA, 20 bp, Artificial Sequence
  Description of Artificial Sequence: Synthetic oligonucleotide
  Target: APOC3; (-) strand; PAM type: YTN; PAM sequence: TTT
cagagcttactctgtgccag

SEQ ID NO: 10895 - DNA, 20 bp, Artificial Sequence
  Description of Artificial Sequence: Synthetic oligonucleotide
  Target: APOC3; (-) strand; PAM type: YTN; PAM sequence: TTT
tcagagcttactctgtgcca

SEQ ID NO: 10896 - DNA, 20 bp, Artificial Sequence
  Description of Artificial Sequence: Synthetic oligonucleotide
  Target: APOC3; (-) strand; PAM type: YTN; PAM sequence: TTT
ttcagagcttactctgtgcc

SEQ ID NO: 10897 - DNA, 20 bp, Artificial Sequence
  Description of Artificial Sequence: Synthetic oligonucleotide
  Target: APOC3; (-) strand; PAM type: YTN; PAM sequence: CTA
tttttcagagcttactctgt

SEQ ID NO: 10898 - DNA, 20 bp, Artificial Sequence
  Description of Artificial Sequence: Synthetic oligonucleotide
  Target: APOC3; (-) strand; PAM type: YTN; PAM sequence: TTA
taataacagcaactattttt

SEQ ID NO: 10899 - DNA, 20 bp, Artificial Sequence
  Description of Artificial Sequence: Synthetic oligonucleotide
  Target: APOC3; (-) strand; PAM type: YTN; PAM sequence: TTA
ttataataacagcaactatt

SEQ ID NO: 10900 - DNA, 20 bp, Artificial Sequence
  Description of Artificial Sequence: Synthetic oligonucleotide
  Target: APOC3; (-) strand; PAM type: YTN; PAM sequence: TTA
tacagtatgattattataat

SEQ ID NO: 10901 - DNA, 20 bp, Artificial Sequence
  Description of Artificial Sequence: Synthetic oligonucleotide
  Target: APOC3; (-) strand; PAM type: YTN; PAM sequence: TTA
ttatacagtatgattattat

SEQ ID NO: 10902 - DNA, 20 bp, Artificial Sequence
  Description of Artificial Sequence: Synthetic oligonucleotide
  Target: APOC3; (-) strand; PAM type: YTN; PAM sequence: CTC
caaatcaggaacacagtatg

SEQ ID NO: 10903 - DNA, 20 bp, Artificial Sequence
  Description of Artificial Sequence: Synthetic oligonucleotide
  Target: APOC3; (-) strand; PAM type: YTN; PAM sequence: TTG
ctccaaatcaggaacacagt

SEQ ID NO: 10904 - DNA, 20 bp, Artificial Sequence
  Description of Artificial Sequence: Synthetic oligonucleotide
  Target: APOC3; (-) strand; PAM type: YTN; PAM sequence: TTT
gctccaaatcaggaacacag

SEQ ID NO: 10905 - DNA, 20 bp, Artificial Sequence
  Description of Artificial Sequence: Synthetic oligonucleotide
  Target: APOC3; (-) strand; PAM type: YTN; PAM sequence: CTT
tgctccaaatcaggaacaca

SEQ ID NO: 10906 - DNA, 20 bp, Artificial Sequence
  Description of Artificial Sequence: Synthetic oligonucleotide
  Target: APOC3; (-) strand; PAM type: YTN; PAM sequence: CTG
ctttgctccaaatcaggaac

SEQ ID NO: 10907 - DNA, 20 bp, Artificial Sequence
  Description of Artificial Sequence: Synthetic oligonucleotide
  Target: APOC3; (-) strand; PAM type: YTN; PAM sequence: CTC
cctgctttgctccaaatcag

SEQ ID NO: 10908 - DNA, 20 bp, Artificial Sequence
  Description of Artificial Sequence: Synthetic oligonucleotide
  Target: APOC3; (-) strand; PAM type: YTN; PAM sequence: CTA
ccctccctgctttgctccaa

SEQ ID NO: 10909 - DNA, 20 bp, Artificial Sequence
  Description of Artificial Sequence: Synthetic oligonucleotide
  Target: APOC3; (-) strand; PAM type: YTN; PAM sequence: CTG
ctaccctccctgctttgctc

SEQ ID NO: 10910 - DNA, 20 bp, Artificial Sequence
  Description of Artificial Sequence: Synthetic oligonucleotide
  Target: APOC3; (-) strand; PAM type: YTN; PAM sequence: CTC
tgctaccctccctgctttgc

SEQ ID NO: 10911 - DNA, 20 bp, Artificial Sequence
  Description of Artificial Sequence: Synthetic oligonucleotide
  Target: APOC3; (-) strand; PAM type: YTN; PAM sequence: CTA
gaggagggagcactctgcta

SEQ ID NO: 10912 - DNA, 20 bp, Artificial Sequence
  Description of Artificial Sequence: Synthetic oligonucleotide
  Target: APOC3; (-) strand; PAM type: YTN; PAM sequence: CTC
actagaggagggagcactct

SEQ ID NO: 10913 - DNA, 20 bp, Artificial Sequence
  Description of Artificial Sequence: Synthetic oligonucleotide
  Target: APOC3; (-) strand; PAM type: YTN; PAM sequence: CTC
tcactagaggagggagcact

SEQ ID NO: 10914 - DNA, 20 bp, Artificial Sequence
  Description of Artificial Sequence: Synthetic oligonucleotide
  Target: APOC3; (-) strand; PAM type: YTN; PAM sequence: CTG
ccactctcactagaggaggg

SEQ ID NO: 10915 - DNA, 20 bp, Artificial Sequence
  Description of Artificial Sequence: Synthetic oligonucleotide
  Target: APOC3; (-) strand; PAM type: YTN; PAM sequence: CTC
tgccactctcactagaggag

SEQ ID NO: 10916 - DNA, 20 bp, Artificial Sequence
  Description of Artificial Sequence: Synthetic oligonucleotide
  Target: APOC3; (-) strand; PAM type: YTN; PAM sequence: CTC
actctgccactctcactaga

SEQ ID NO: 10917 - DNA, 20 bp, Artificial Sequence
  Description of Artificial Sequence: Synthetic oligonucleotide
  Target: APOC3; (-) strand; PAM type: YTN; PAM sequence: CTG
agtctcactctgccactctc

SEQ ID NO: 10918 - DNA, 20 bp, Artificial Sequence
  Description of Artificial Sequence: Synthetic oligonucleotide
  Target: APOC3; (-) strand; PAM type: YTN; PAM sequence: CTC
agagggctgagtctcactct

SEQ ID NO: 10919 - DNA, 20 bp, Artificial Sequence
  Description of Artificial Sequence: Synthetic oligonucleotide
  Target: APOC3; (-) strand; PAM type: YTN; PAM sequence: CTG
gcgcccctcagagggctgag

SEQ ID NO: 10920 - DNA, 20 bp, Artificial Sequence
  Description of Artificial Sequence: Synthetic oligonucleotide
  Target: APOC3; (-) strand; PAM type: YTN; PAM sequence: CTG
gcccacctggcgcccctcag

SEQ ID NO: 10921 - DNA, 20 bp, Artificial Sequence
  Description of Artificial Sequence: Synthetic oligonucleotide
  Target: APOC3; (-) strand; PAM type: YTN; PAM sequence: CTC
tggcccacctggcgcccctc

SEQ ID NO: 10922 - DNA, 20 bp, Artificial Sequence
  Description of Artificial Sequence: Synthetic oligonucleotide
  Target: APOC3; (-) strand; PAM type: YTN; PAM sequence: CTG
cctctggcccacctggcgcc

SEQ ID NO: 10923 - DNA, 20 bp, Artificial Sequence
  Description of Artificial Sequence: Synthetic oligonucleotide
  Target: APOC3; (-) strand; PAM type: YTN; PAM sequence: CTG
gtcccacccatcaccctgcc

SEQ ID NO: 10924 - DNA, 20 bp, Artificial Sequence
  Description of Artificial Sequence: Synthetic oligonucleotide
  Target: APOC3; (-) strand; PAM type: YTN; PAM sequence: CTC
aggctggtcccacccatcac

SEQ ID NO: 10925 - DNA, 20 bp, Artificial Sequence
  Description of Artificial Sequence: Synthetic oligonucleotide
  Target: APOC3; (-) strand; PAM type: YTN; PAM sequence: CTG
gggggcaagaagggcaggag

SEQ ID NO: 10926 - DNA, 20 bp, Artificial Sequence
  Description of Artificial Sequence: Synthetic oligonucleotide
  Target: APOC3; (-) strand; PAM type: YTN; PAM sequence: CTG
cccagggagtgtggctgggg

SEQ ID NO: 10927 - DNA, 20 bp, Artificial Sequence
  Description of Artificial Sequence: Synthetic oligonucleotide
  Target: APOC3; (-) strand; PAM type: YTN; PAM sequence: CTC
ctgcccagggagtgtggctg

SEQ ID NO: 10928 - DNA, 20 bp, Artificial Sequence
  Description of Artificial Sequence: Synthetic oligonucleotide
  Target: APOC3; (-) strand; PAM type: YTN; PAM sequence: CTG
ctcctgcccagggagtgtgg

SEQ ID NO: 10929 - DNA, 20 bp, Artificial Sequence
  Description of Artificial Sequence: Synthetic oligonucleotide
  Target: APOC3; (-) strand; PAM type: YTN; PAM sequence: CTC
aagccagctgctcctgccca

SEQ ID NO: 10930 - DNA, 20 bp, Artificial Sequence
  Description of Artificial Sequence: Synthetic oligonucleotide
  Target: APOC3; (-) strand; PAM type: YTN; PAM sequence: CTG
ctcaagccagctgctcctgc

SEQ ID NO: 10931 - DNA, 20 bp, Artificial Sequence
  Description of Artificial Sequence: Synthetic oligonucleotide
  Target: APOC3; (-) strand; PAM type: YTN; PAM sequence: TTC
tgctcaagccagctgctcct

SEQ ID NO: 10932 - DNA, 20 bp, Artificial Sequence
  Description of Artificial Sequence: Synthetic oligonucleotide
  Target: APOC3; (-) strand; PAM type: YTN; PAM sequence: CTC
aggtcccaagattctgctca

SEQ ID NO: 10933 - DNA, 20 bp, Artificial Sequence
  Description of Artificial Sequence: Synthetic oligonucleotide
  Target: APOC3; (-) strand; PAM type: YTN; PAM sequence: CTG
agagcctcaggtcccaagat

SEQ ID NO: 10934 - DNA, 20 bp, Artificial Sequence
  Description of Artificial Sequence: Synthetic oligonucleotide
  Target: APOC3; (-) strand; PAM type: YTN; PAM sequence: CTC
catcccccaatgggaggtcc

SEQ ID NO: 10935 - DNA, 20 bp, Artificial Sequence
  Description of Artificial Sequence: Synthetic oligonucleotide
  Target: APOC3; (-) strand; PAM type: YTN; PAM sequence: TTG
ccctccatcccccaatggga

SEQ ID NO: 10936 - DNA, 20 bp, Artificial Sequence
  Description of Artificial Sequence: Synthetic oligonucleotide
  Target: APOC3; (-) strand; PAM type: YTN; PAM sequence: CTG
ggcaccaccaccattgccct

SEQ ID NO: 10937 - DNA, 20 bp, Artificial Sequence
  Description of Artificial Sequence: Synthetic oligonucleotide
  Target: APOC3; (-) strand; PAM type: YTN; PAM sequence: CTC
ctgggcaccaccaccattgc

SEQ ID NO: 10938 - DNA, 20 bp, Artificial Sequence
  Description of Artificial Sequence: Synthetic oligonucleotide
  Target: APOC3; (-) strand; PAM type: YTN; PAM sequence: CTA
agtagaagacctcctgggca

SEQ ID NO: 10939 - DNA, 20 bp, Artificial Sequence
  Description of Artificial Sequence: Synthetic oligonucleotide
  Target: APOC3; (-) strand; PAM type: YTN; PAM sequence: TTA
gagatccaatagacatctaa

SEQ ID NO: 10940 - DNA, 20 bp, Artificial Sequence
  Description of Artificial Sequence: Synthetic oligonucleotide
  Target: APOC3; (-) strand; PAM type: YTN; PAM sequence: TTT
agagatccaatagacatcta

SEQ ID NO: 10941 - DNA, 20 bp, Artificial Sequence
  Description of Artificial Sequence: Synthetic oligonucleotide
  Target: APOC3; (-) strand; PAM type: YTN; PAM sequence: CTC
atttagagatccaatagaca

SEQ ID NO: 10942 - DNA, 20 bp, Artificial Sequence
  Description of Artificial Sequence: Synthetic oligonucleotide
  Target: APOC3; (-) strand; PAM type: YTN; PAM sequence: TTA
tgcatgcagcctcatttaga

SEQ ID NO: 10943 - DNA, 20 bp, Artificial Sequence
  Description of Artificial Sequence: Synthetic oligonucleotide
  Target: APOC3; (-) strand; PAM type: YTN; PAM sequence: TTG
tgtgtgattatgcatgcagc

SEQ ID NO: 10944 - DNA, 20 bp, Artificial Sequence
  Description of Artificial Sequence: Synthetic oligonucleotide
  Target: APOC3; (-) strand; PAM type: YTN; PAM sequence: TTT
gtgtgtgattatgcatgcag

SEQ ID NO: 10945 - DNA, 20 bp, Artificial Sequence
  Description of Artificial Sequence: Synthetic oligonucleotide
  Target: APOC3; (-) strand; PAM type: YTN; PAM sequence: CTC
agtggatgtttgtgtgtgat

SEQ ID NO: 10946 - DNA, 20 bp, Artificial Sequence
  Description of Artificial Sequence: Synthetic oligonucleotide
  Target: APOC3; (-) strand; PAM type: YTN; PAM sequence: TTC
tcagtggatgtttgtgtgtg

SEQ ID NO: 10947 - DNA, 20 bp, Artificial Sequence
  Description of Artificial Sequence: Synthetic oligonucleotide
  Target: APOC3; (-) strand; PAM type: YTN; PAM sequence: CTT
ctcagtggatgtttgtgtgt

SEQ ID NO: 10948 - DNA, 20 bp, Artificial Sequence
  Description of Artificial Sequence: Synthetic oligonucleotide
  Target: APOC3; (-) strand; PAM type: YTN; PAM sequence: CTG
acgtggtgtgtcaccttctc

SEQ ID NO: 10949 - DNA, 20 bp, Artificial Sequence
  Description of Artificial Sequence: Synthetic oligonucleotide
  Target: APOC3; (-) strand; PAM type: YTN; PAM sequence: CTA
ggagtggtgtggtccggcag

SEQ ID NO: 10950 - DNA, 20 bp, Artificial Sequence
  Description of Artificial Sequence: Synthetic oligonucleotide
  Target: APOC3; (-) strand; PAM type: YTN; PAM sequence: CTC
atagtcactaggagtggtgt

SEQ ID NO: 10951 - DNA, 20 bp, Artificial Sequence
  Description of Artificial Sequence: Synthetic oligonucleotide
  Target: APOC3; (-) strand; PAM type: YTN; PAM sequence: CTG
gatgtcacctcatagtcact

SEQ ID NO: 10952 - DNA, 20 bp, Artificial Sequence
  Description of Artificial Sequence: Synthetic oligonucleotide
  Target: APOC3; (-) strand; PAM type: YTN; PAM sequence: CTC
accgacaggagccaatagtg

SEQ ID NO: 10953 - DNA, 20 bp, Artificial Sequence
  Description of Artificial Sequence: Synthetic oligonucleotide
  Target: APOC3; (-) strand; PAM type: YTN; PAM sequence: CTG
cactcaccgacaggagccaa

SEQ ID NO: 10954 - DNA, 20 bp, Artificial Sequence
  Description of Artificial Sequence: Synthetic oligonucleotide
  Target: APOC3; (-) strand; PAM type: YTN; PAM sequence: TTG
tcaggcactgcactcaccga

SEQ ID NO: 10955 - DNA, 20 bp, Artificial Sequence
  Description of Artificial Sequence: Synthetic oligonucleotide
  Target: APOC3; (-) strand; PAM type: YTN; PAM sequence: CTG
ttgtcaggcactgcactcac

SEQ ID NO: 10956 - DNA, 20 bp, Artificial Sequence
  Description of Artificial Sequence: Synthetic oligonucleotide
  Target: APOC3; (-) strand; PAM type: YTN; PAM sequence: CTC
actgttgtcaggcactgcac

SEQ ID NO: 10957 - DNA, 20 bp, Artificial Sequence
  Description of Artificial Sequence: Synthetic oligonucleotide
  Target: APOC3; (-) strand; PAM type: YTN; PAM sequence: TTA
caaataaatgtagctcactg

SEQ ID NO: 10958 - DNA, 20 bp, Artificial Sequence
  Description of Artificial Sequence: Synthetic oligonucleotide
  Target: APOC3; (-) strand; PAM type: YTN; PAM sequence: TTT
acaaataaatgtagctcact

SEQ ID NO: 10959 - DNA, 20 bp, Artificial Sequence
  Description of Artificial Sequence: Synthetic oligonucleotide
  Target: APOC3; (-) strand; PAM type: YTN; PAM sequence: TTT
tacaaataaatgtagctcac

SEQ ID NO: 10960 - DNA, 20 bp, Artificial Sequence
  Description of Artificial Sequence: Synthetic oligonucleotide
  Target: APOC3; (-) strand; PAM type: YTN; PAM sequence: TTT
ttacaaataaatgtagctca

SEQ ID NO: 10961 - DNA, 20 bp, Artificial Sequence
  Description of Artificial Sequence: Synthetic oligonucleotide
  Target: APOC3; (-) strand; PAM type: YTN; PAM sequence: TTC
atttttacaaataaatgtag

SEQ ID NO: 10962 - DNA, 20 bp, Artificial Sequence
  Description of Artificial Sequence: Synthetic oligonucleotide
  Target: APOC3; (-) strand; PAM type: YTN; PAM sequence: CTG
atggcgttcatttttacaaa

SEQ ID NO: 10963 - DNA, 20 bp, Artificial Sequence
  Description of Artificial Sequence: Synthetic oligonucleotide
  Target: APOC3; (-) strand; PAM type: YTN; PAM sequence: CTC
tgatggcgttcatttttaca

SEQ ID NO: 10964 - DNA, 20 bp, Artificial Sequence
  Description of Artificial Sequence: Synthetic oligonucleotide
  Target: APOC3; (-) strand; PAM type: YTN; PAM sequence: CTA
ctctgatggcgttcattttt

SEQ ID NO: 10965 - DNA, 20 bp, Artificial Sequence
  Description of Artificial Sequence: Synthetic oligonucleotide
  Target: APOC3; (-) strand; PAM type: YTN; PAM sequence: TTG
tggtctactctgatggcgtt

SEQ ID NO: 10966 - DNA, 20 bp, Artificial Sequence
  Description of Artificial Sequence: Synthetic oligonucleotide
  Target: APOC3; (-) strand; PAM type: YTN; PAM sequence: TTA
gtacaattgtggtctactct

SEQ ID NO: 10967 - DNA, 20 bp, Artificial Sequence
  Description of Artificial Sequence: Synthetic oligonucleotide
  Target: APOC3; (-) strand; PAM type: YTN; PAM sequence: TTA
gagttagtacaattgtggtc

SEQ ID NO: 10968 - DNA, 20 bp, Artificial Sequence
  Description of Artificial Sequence: Synthetic oligonucleotide
  Target: APOC3; (-) strand; PAM type: YTN; PAM sequence: CTG
aaaaaatgaacacaaagcaa

SEQ ID NO: 10969 - DNA, 20 bp, Artificial Sequence
  Description of Artificial Sequence: Synthetic oligonucleotide
  Target: APOC3; (-) strand; PAM type: YTN; PAM sequence: CTG
gaaactgaaaaaatgaacac

SEQ ID NO: 10970 - DNA, 20 bp, Artificial Sequence
  Description of Artificial Sequence: Synthetic oligonucleotide
  Target: APOC3; (-) strand; PAM type: YTN; PAM sequence: TTC
tggaaactgaaaaaatgaac

SEQ ID NO: 10971 - DNA, 20 bp, Artificial Sequence
  Description of Artificial Sequence: Synthetic oligonucleotide
  Target: APOC3; (-) strand; PAM type: YTN; PAM sequence: CTT
ctggaaactgaaaaaatgaa

SEQ ID NO: 10972 - DNA, 20 bp, Artificial Sequence
  Description of Artificial Sequence: Synthetic oligonucleotide
  Target: APOC3; (-) strand; PAM type: YTN; PAM sequence: TTA
agccacttctggaaactgaa

SEQ ID NO: 10973 - DNA, 20 bp, Artificial Sequence
  Description of Artificial Sequence: Synthetic oligonucleotide
  Target: APOC3; (-) strand; PAM type: YTN; PAM sequence: CTA
ggaaacattaagccacttct

SEQ ID NO: 10974 - DNA, 20 bp, Artificial Sequence
  Description of Artificial Sequence: Synthetic oligonucleotide
  Target: APOC3; (-) strand; PAM type: YTN; PAM sequence: TTG
accctaggaaacattaagcc

SEQ ID NO: 10975 - DNA, 20 bp, Artificial Sequence
  Description of Artificial Sequence: Synthetic oligonucleotide
  Target: APOC3; (-) strand; PAM type: YTN; PAM sequence: TTT
gaccctaggaaacattaagc

SEQ ID NO: 10976 - DNA, 20 bp, Artificial Sequence
  Description of Artificial Sequence: Synthetic oligonucleotide
  Target: APOC3; (-) strand; PAM type: YTN; PAM sequence: CTT
tgaccctaggaaacattaag

SEQ ID NO: 10977 - DNA, 20 bp, Artificial Sequence
  Description of Artificial Sequence: Synthetic oligonucleotide
  Target: APOC3; (-) strand; PAM type: YTN; PAM sequence: CTG
cctttgaccctaggaaacat

SEQ ID NO: 10978 - DNA, 20 bp, Artificial Sequence
  Description of Artificial Sequence: Synthetic oligonucleotide
  Target: APOC3; (-) strand; PAM type: YTN; PAM sequence: TTG
actgcctttgaccctaggaa

SEQ ID NO: 10979 - DNA, 20 bp, Artificial Sequence
  Description of Artificial Sequence: Synthetic oligonucleotide
  Target: APOC3; (-) strand; PAM type: YTN; PAM sequence: TTT
gactgcctttgaccctagga

SEQ ID NO: 10980 - DNA, 20 bp, Artificial Sequence
  Description of Artificial Sequence: Synthetic oligonucleotide
  Target: APOC3; (-) strand; PAM type: YTN; PAM sequence: CTA
cagggcagtggggacccagc

SEQ ID NO: 10981 - DNA, 20 bp, Artificial Sequence
  Description of Artificial Sequence: Synthetic oligonucleotide
  Target: APOC3; (-) strand; PAM type: YTN; PAM sequence: CTG
catcaaaaaggaggcagcat

SEQ ID NO: 10982 - DNA, 20 bp, Artificial Sequence
  Description of Artificial Sequence: Synthetic oligonucleotide
  Target: APOC3; (-) strand; PAM type: YTN; PAM sequence: CTG
accccaacaatcacggagag

SEQ ID NO: 10983 - DNA, 20 bp, Artificial Sequence
  Description of Artificial Sequence: Synthetic oligonucleotide
  Target: APOC3; (-) strand; PAM type: YTN; PAM sequence: CTC
cagcatctgaccccaacaat

SEQ ID NO: 10984 - DNA, 20 bp, Artificial Sequence
  Description of Artificial Sequence: Synthetic oligonucleotide
  Target: APOC3; (-) strand; PAM type: YTN; PAM sequence: CTG
gatgccaagccagggagtgg

SEQ ID NO: 10985 - DNA, 20 bp, Artificial Sequence
  Description of Artificial Sequence: Synthetic oligonucleotide
  Target: APOC3; (-) strand; PAM type: YTN; PAM sequence: TTG
gagcctggatgccaagccag

SEQ ID NO: 10986 - DNA, 20 bp, Artificial Sequence
  Description of Artificial Sequence: Synthetic oligonucleotide
  Target: APOC3; (-) strand; PAM type: YTN; PAM sequence: TTG
cccaaggacacacaggcagt

SEQ ID NO: 10987 - DNA, 20 bp, Artificial Sequence
  Description of Artificial Sequence: Synthetic oligonucleotide
  Target: APOC3; (-) strand; PAM type: YTN; PAM sequence: CTT
gcccaaggacacacaggcag

SEQ ID NO: 10988 - DNA, 20 bp, Artificial Sequence
  Description of Artificial Sequence: Synthetic oligonucleotide
  Target: APOC3; (-) strand; PAM type: YTN; PAM sequence: TTA
tgagacttgcccaaggacac

SEQ ID NO: 10989 - DNA, 20 bp, Artificial Sequence
  Description of Artificial Sequence: Synthetic oligonucleotide
  Target: APOC3; (-) strand; PAM type: YTN; PAM sequence: CTC
agagaggttatgagacttgc

SEQ ID NO: 10990 - DNA, 20 bp, Artificial Sequence
  Description of Artificial Sequence: Synthetic oligonucleotide
  Target: APOC3; (-) strand; PAM type: YTN; PAM sequence: CTG
aggctcagagaggttatgag

SEQ ID NO: 10991 - DNA, 20 bp, Artificial Sequence
  Description of Artificial Sequence: Synthetic oligonucleotide
  Target: APOC3; (-) strand; PAM type: YTN; PAM sequence: CTC
accaaggtaactgaggctca

SEQ ID NO: 10992 - DNA, 20 bp, Artificial Sequence
  Description of Artificial Sequence: Synthetic oligonucleotide
  Target: APOC3; (-) strand; PAM type: YTN; PAM sequence: TTA
tgtctcaccaaggtaactga

SEQ ID NO: 10993 - DNA, 20 bp, Artificial Sequence
  Description of Artificial Sequence: Synthetic oligonucleotide
  Target: APOC3; (-) strand; PAM type: YTN; PAM sequence: CTA
ggaggcaggtacaatggtta

SEQ ID NO: 10994 - DNA, 20 bp, Artificial Sequence
  Description of Artificial Sequence: Synthetic oligonucleotide
  Target: APOC3; (-) strand; PAM type: YTN; PAM sequence: CTC
acagcctaggaggcaggtac

SEQ ID NO: 10995 - DNA, 20 bp, Artificial Sequence
  Description of Artificial Sequence: Synthetic oligonucleotide
  Target: APOC3; (-) strand; PAM type: YTN; PAM sequence: CTC
agtgaatcctcacagcctag

SEQ ID NO: 10996 - DNA, 20 bp, Artificial Sequence
  Description of Artificial Sequence: Synthetic oligonucleotide
  Target: APOC3; (-) strand; PAM type: YTN; PAM sequence: CTA
taagatcatctcagtgaatc

SEQ ID NO: 10997 - DNA, 20 bp, Artificial Sequence
  Description of Artificial Sequence: Synthetic oligonucleotide
  Target: APOC3; (-) strand; PAM type: YTN; PAM sequence: TTG
caagcactataagatcatct

SEQ ID NO: 10998 - DNA, 20 bp, Artificial Sequence
  Description of Artificial Sequence: Synthetic oligonucleotide
  Target: APOC3; (-) strand; PAM type: YTN; PAM sequence: TTG
ttgcaagcactataagatca

SEQ ID NO: 10999 - DNA, 20 bp, Artificial Sequence
  Description of Artificial Sequence: Synthetic oligonucleotide
  Target: APOC3; (-) strand; PAM type: YTN; PAM sequence: CTA
tgtgccagacattgttgcaa

SEQ ID NO: 11000 - DNA, 20 bp, Artificial Sequence
  Description of Artificial Sequence: Synthetic oligonucleotide
  Target: APOC3; (-) strand; PAM type: YTN; PAM sequence: TTC
ctatgtgccagacattgttg

SEQ ID NO: 11001 - DNA, 20 bp, Artificial Sequence
  Description of Artificial Sequence: Synthetic oligonucleotide
  Target: APOC3; (-) strand; PAM type: YTN; PAM sequence: TTT
cctatgtgccagacattgtt

SEQ ID NO: 11002 - DNA, 20 bp, Artificial Sequence
  Description of Artificial Sequence: Synthetic oligonucleotide
  Target: APOC3; (-) strand; PAM type: YTN; PAM sequence: TTT
tcctatgtgccagacattgt

SEQ ID NO: 11003 - DNA, 20 bp, Artificial Sequence
  Description of Artificial Sequence: Synthetic oligonucleotide
  Target: APOC3; (-) strand; PAM type: YTN; PAM sequence: CTT
ttcctatgtgccagacattg

SEQ ID NO: 11004 - DNA, 20 bp, Artificial Sequence
  Description of Artificial Sequence: Synthetic oligonucleotide
  Target: APOC3; (-) strand; PAM type: YTN; PAM sequence: TTA
gtgatcacttttcctatgtg

SEQ ID NO: 11005 - DNA, 20 bp, Artificial Sequence
  Description of Artificial Sequence: Synthetic oligonucleotide
  Target: APOC3; (-) strand; PAM type: YTN; PAM sequence: TTT
agtgatcacttttcctatgt

SEQ ID NO: 11006 - DNA, 20 bp, Artificial Sequence
  Description of Artificial Sequence: Synthetic oligonucleotide
  Target: APOC3; (-) strand; PAM type: YTN; PAM sequence: CTA
acatttagtgatcacttttc

SEQ ID NO: 11007 - DNA, 20 bp, Artificial Sequence
  Description of Artificial Sequence: Synthetic oligonucleotide
  Target: APOC3; (-) strand; PAM type: YTN; PAM sequence: TTG
caggagtaagacgtggctaa

SEQ ID NO: 11008 - DNA, 20 bp, Artificial Sequence
  Description of Artificial Sequence: Synthetic oligonucleotide
  Target: APOC3; (-) strand; PAM type: YTN; PAM sequence: CTT
gcaggagtaagacgtggcta

SEQ ID NO: 11009 - DNA, 20 bp, Artificial Sequence
  Description of Artificial Sequence: Synthetic oligonucleotide
  Target: APOC3; (-) strand; PAM type: YTN; PAM sequence: TTC
cagggaggtgagccttgcag

SEQ ID NO: 11010 - DNA, 20 bp, Artificial Sequence
  Description of Artificial Sequence: Synthetic oligonucleotide
  Target: APOC3; (-) strand; PAM type: YTN; PAM sequence: TTG
ggaccgatgggttccaggga

SEQ ID NO: 11011 - DNA, 20 bp, Artificial Sequence
  Description of Artificial Sequence: Synthetic oligonucleotide
  Target: APOC3; (-) strand; PAM type: YTN; PAM sequence: TTC
aggagcagggttgggaccga

SEQ ID NO: 11012 - DNA, 20 bp, Artificial Sequence
  Description of Artificial Sequence: Synthetic oligonucleotide
  Target: APOC3; (-) strand; PAM type: YTN; PAM sequence: CTG
attcaggagcagggttggga

SEQ ID NO: 11013 - DNA, 20 bp, Artificial Sequence
  Description of Artificial Sequence: Synthetic oligonucleotide
  Target: APOC3; (-) strand; PAM type: YTN; PAM sequence: CTG
tgcctgattcaggagcaggg

SEQ ID NO: 11014 - DNA, 20 bp, Artificial Sequence
  Description of Artificial Sequence: Synthetic oligonucleotide
  Target: APOC3; (-) strand; PAM type: YTN; PAM sequence: CTG
gactgtgcctgattcaggag

SEQ ID NO: 11015 - DNA, 20 bp, Artificial Sequence
  Description of Artificial Sequence: Synthetic oligonucleotide
  Target: APOC3; (-) strand; PAM type: YTN; PAM sequence: CTG
caagctggactgtgcctgat

SEQ ID NO: 11016 - DNA, 20 bp, Artificial Sequence
  Description of Artificial Sequence: Synthetic oligonucleotide
  Target: APOC3; (-) strand; PAM type: YTN; PAM sequence: CTC
ccgctgcaagctggactgtg

SEQ ID NO: 11017 - DNA, 20 bp, Artificial Sequence
  Description of Artificial Sequence: Synthetic oligonucleotide
  Target: APOC3; (-) strand; PAM type: YTN; PAM sequence: TTG
ctcccgctgcaagctggact

SEQ ID NO: 11018 - DNA, 20 bp, Artificial Sequence
  Description of Artificial Sequence: Synthetic oligonucleotide
  Target: APOC3; (-) strand; PAM type: YTN; PAM sequence: TTT
gctcccgctgcaagctggac

SEQ ID NO: 11019 - DNA, 20 bp, Artificial Sequence
  Description of Artificial Sequence: Synthetic oligonucleotide
  Target: APOC3; (-) strand; PAM type: YTN; PAM sequence: CTT
tgctcccgctgcaagctgga

SEQ ID NO: 11020 - DNA, 20 bp, Artificial Sequence
  Description of Artificial Sequence: Synthetic oligonucleotide
  Target: APOC3; (-) strand; PAM type: YTN; PAM sequence: CTG
acctttgctcccgctgcaag

SEQ ID NO: 11021 - DNA, 20 bp, Artificial Sequence
  Description of Artificial Sequence: Synthetic oligonucleotide
  Target: APOC3; (-) strand; PAM type: YTN; PAM sequence: CTG
agtactgacctttgctcccg

SEQ ID NO: 11022 - DNA, 20 bp, Artificial Sequence
  Description of Artificial Sequence: Synthetic oligonucleotide
  Target: APOC3; (-) strand; PAM type: YTN; PAM sequence: CTG
gggaagggacaggggcactg

SEQ ID NO: 11023 - DNA, 20 bp, Artificial Sequence
  Description of Artificial Sequence: Synthetic oligonucleotide
  Target: APOC3; (-) strand; PAM type: YTN; PAM sequence: CTG
gcctggggaagggacagggg

SEQ ID NO: 11024 - DNA, 20 bp, Artificial Sequence
  Description of Artificial Sequence: Synthetic oligonucleotide
  Target: APOC3; (-) strand; PAM type: YTN; PAM sequence: CTC
tggcctggggaagggacagg

SEQ ID NO: 11025 - DNA, 20 bp, Artificial Sequence
  Description of Artificial Sequence: Synthetic oligonucleotide
  Target: APOC3; (-) strand; PAM type: YTN; PAM sequence: CTC
ccctctggcctggggaaggg

SEQ ID NO: 11026 - DNA, 20 bp, Artificial Sequence
  Description of Artificial Sequence: Synthetic oligonucleotide
  Target: APOC3; (-) strand; PAM type: YTN; PAM sequence: CTC
ctcccctctggcctggggaa

SEQ ID NO: 11027 - DNA, 20 bp, Artificial Sequence
  Description of Artificial Sequence: Synthetic oligonucleotide
  Target: APOC3; (-) strand; PAM type: YTN; PAM sequence: CTC
ctcctcccctctggcctggg

SEQ ID NO: 11028 - DNA, 20 bp, Artificial Sequence
  Description of Artificial Sequence: Synthetic oligonucleotide
  Target: APOC3; (-) strand; PAM type: YTN; PAM sequence: CTC
agtctcctcctcccctctgg

SEQ ID NO: 11029 - DNA, 20 bp, Artificial Sequence
  Description of Artificial Sequence: Synthetic oligonucleotide
  Target: APOC3; (-) strand; PAM type: YTN; PAM sequence: TTC
gtgactcagtctcctcctcc

SEQ ID NO: 11030 - DNA, 20 bp, Artificial Sequence
  Description of Artificial Sequence: Synthetic oligonucleotide
  Target: APOC3; (-) strand; PAM type: YTN; PAM sequence: CTG
aggtgtcattcgtgactcag

SEQ ID NO: 11031 - DNA, 20 bp, Artificial Sequence
  Description of Artificial Sequence: Synthetic oligonucleotide
  Target: APOC3; (-) strand; PAM type: YTN; PAM sequence: CTG
cggctgaggtgtcattcgtg

SEQ ID NO: 11032 - DNA, 20 bp, Artificial Sequence
  Description of Artificial Sequence: Synthetic oligonucleotide
  Target: APOC3; (-) strand; PAM type: YTN; PAM sequence: CTG
gaggtcaaactgcggctgag

SEQ ID NO: 11033 - DNA, 20 bp, Artificial Sequence
  Description of Artificial Sequence: Synthetic oligonucleotide
  Target: APOC3; (-) strand; PAM type: YTN; PAM sequence: CTG
taagtcctggaggtcaaact

SEQ ID NO: 11034 - DNA, 20 bp, Artificial Sequence
  Description of Artificial Sequence: Synthetic oligonucleotide
  Target: APOC3; (-) strand; PAM type: YTN; PAM sequence: CTA
ggactgtaagtcctggaggt

SEQ ID NO: 11035 - DNA, 20 bp, Artificial Sequence
  Description of Artificial Sequence: Synthetic oligonucleotide
  Target: APOC3; (-) strand; PAM type: YTN; PAM sequence: CTG
ctaggactgtaagtcctgga

SEQ ID NO: 11036 - DNA, 20 bp, Artificial Sequence
  Description of Artificial Sequence: Synthetic oligonucleotide
  Target: APOC3; (-) strand; PAM type: YTN; PAM sequence: CTA
gtggcaccggctgctaggac

SEQ ID NO: 11037 - DNA, 20 bp, Artificial Sequence
  Description of Artificial Sequence: Synthetic oligonucleotide
  Target: APOC3; (-) strand; PAM type: YTN; PAM sequence: CTC
acatgctagtggcaccggct

SEQ ID NO: 11038 - DNA, 20 bp, Artificial Sequence
  Description of Artificial Sequence: Synthetic oligonucleotide
  Target: APOC3; (-) strand; PAM type: YTN; PAM sequence: CTC
tcacatgctagtggcaccgg

SEQ ID NO: 11039 - DNA, 20 bp, Artificial Sequence
  Description of Artificial Sequence: Synthetic oligonucleotide
  Target: APOC3; (-) strand; PAM type: YTN; PAM sequence: CTG
gacctctcacatgctagtgg

SEQ ID NO: 11040 - DNA, 20 bp, Artificial Sequence
  Description of Artificial Sequence: Synthetic oligonucleotide
  Target: APOC3; (-) strand; PAM type: YTN; PAM sequence: CTC
tggacctctcacatgctagt

SEQ ID NO: 11041 - DNA, 20 bp, Artificial Sequence
  Description of Artificial Sequence: Synthetic oligonucleotide
  Target: APOC3; (-) strand; PAM type: YTN; PAM sequence: CTC
ccagcatgggtgcacccagg

SEQ ID NO: 11042 - DNA, 20 bp, Artificial Sequence
  Description of Artificial Sequence: Synthetic oligonucleotide
  Target: APOC3; (-) strand; PAM type: YTN; PAM sequence: CTC
aaatggtgcaggcgctccca

SEQ ID NO: 11043 - DNA, 20 bp, Artificial Sequence
  Description of Artificial Sequence: Synthetic oligonucleotide
  Target: APOC3; (-) strand; PAM type: YTN; PAM sequence: CTC
ggacatgctcaaatggtgca

SEQ ID NO: 11044 - DNA, 20 bp, Artificial Sequence
  Description of Artificial Sequence: Synthetic oligonucleotide
  Target: APOC3; (-) strand; PAM type: YTN; PAM sequence: CTC
tcggacatgctcaaatggtg

SEQ ID NO: 11045 - DNA, 20 bp, Artificial Sequence
  Description of Artificial Sequence: Synthetic oligonucleotide
  Target: APOC3; (-) strand; PAM type: YTN; PAM sequence: CTG
gtggatgctctcggacatgc

SEQ ID NO: 11046 - DNA, 20 bp, Artificial Sequence
  Description of Artificial Sequence: Synthetic oligonucleotide
  Target: APOC3; (-) strand; PAM type: YTN; PAM sequence: CTC
tggtggatgctctcggacat

SEQ ID NO: 11047 - DNA, 20 bp, Artificial Sequence
  Description of Artificial Sequence: Synthetic oligonucleotide
  Target: APOC3; (-) strand; PAM type: YTN; PAM sequence: CTG
tgaatccacacacactctgg

SEQ ID NO: 11048 - DNA, 20 bp, Artificial Sequence
  Description of Artificial Sequence: Synthetic oligonucleotide
  Target: APOC3; (-) strand; PAM type: YTN; PAM sequence: TTC
tgtgaatccacacacactct

SEQ ID NO: 11049 - DNA, 20 bp, Artificial Sequence
  Description of Artificial Sequence: Synthetic oligonucleotide
  Target: APOC3; (-) strand; PAM type: YTN; PAM sequence: CTT
ctgtgaatccacacacactc

SEQ ID NO: 11050 - DNA, 20 bp, Artificial Sequence
  Description of Artificial Sequence: Synthetic oligonucleotide
  Target: APOC3; (-) strand; PAM type: YTN; PAM sequence: TTG
cacacttctgtgaatccaca

SEQ ID NO: 11051 - DNA, 20 bp, Artificial Sequence
  Description of Artificial Sequence: Synthetic oligonucleotide
  Target: APOC3; (-) strand; PAM type: YTN; PAM sequence: TTT
gcacacttctgtgaatccac

SEQ ID NO: 11052 - DNA, 20 bp, Artificial Sequence
  Description of Artificial Sequence: Synthetic oligonucleotide
  Target: APOC3; (-) strand; PAM type: YTN; PAM sequence: TTA
gtgatttgcacacttctgtg

SEQ ID NO: 11053 - DNA, 20 bp, Artificial Sequence
  Description of Artificial Sequence: Synthetic oligonucleotide
  Target: APOC3; (-) strand; PAM type: YTN; PAM sequence: CTT
agtgatttgcacacttctgt

SEQ ID NO: 11054 - DNA, 20 bp, Artificial Sequence
  Description of Artificial Sequence: Synthetic oligonucleotide
  Target: APOC3; (-) strand; PAM type: YTN; PAM sequence: TTC
ttagtgatttgcacacttct

SEQ ID NO: 11055 - DNA, 20 bp, Artificial Sequence
  Description of Artificial Sequence: Synthetic oligonucleotide
  Target: APOC3; (-) strand; PAM type: YTN; PAM sequence: TTG
gttcttagtgatttgcacac

SEQ ID NO: 11056 - DNA, 20 bp, Artificial Sequence
  Description of Artificial Sequence: Synthetic oligonucleotide
  Target: APOC3; (-) strand; PAM type: YTN; PAM sequence: CTT
ggttcttagtgatttgcaca

SEQ ID NO: 11057 - DNA, 20 bp, Artificial Sequence
  Description of Artificial Sequence: Synthetic oligonucleotide
  Target: APOC3; (-) strand; PAM type: YTN; PAM sequence: CTG
tgccagtcccttggttctta

SEQ ID NO: 11058 - DNA, 20 bp, Artificial Sequence
  Description of Artificial Sequence: Synthetic oligonucleotide
  Target: APOC3; (-) strand; PAM type: YTN; PAM sequence: CTC
gcgagcgtgggtgcacgcat

SEQ ID NO: 11059 - DNA, 20 bp, Artificial Sequence
  Description of Artificial Sequence: Synthetic oligonucleotide
  Target: APOC3; (-) strand; PAM type: YTN; PAM sequence: TTG
aaaggcagcaggtcccctcg

SEQ ID NO: 11060 - DNA, 20 bp, Artificial Sequence
  Description of Artificial Sequence: Synthetic oligonucleotide
  Target: APOC3; (-) strand; PAM type: YTN; PAM sequence: TTA
acaggtcacgtccccgccac

SEQ ID NO: 11061 - DNA, 20 bp, Artificial Sequence
  Description of Artificial Sequence: Synthetic oligonucleotide
  Target: APOC3; (-) strand; PAM type: YTN; PAM sequence: TTC
attaacaggtcacgtccccg

SEQ ID NO: 11062 - DNA, 20 bp, Artificial Sequence
  Description of Artificial Sequence: Synthetic oligonucleotide
  Target: APOC3; (-) strand; PAM type: YTN; PAM sequence: TTG
ggaagtaaatacattcatta

SEQ ID NO: 11063 - DNA, 20 bp, Artificial Sequence
  Description of Artificial Sequence: Synthetic oligonucleotide
  Target: APOC3; (-) strand; PAM type: YTN; PAM sequence: TTT
gggaagtaaatacattcatt

SEQ ID NO: 11064 - DNA, 20 bp, Artificial Sequence
  Description of Artificial Sequence: Synthetic oligonucleotide
  Target: APOC3; (-) strand; PAM type: YTN; PAM sequence: CTT
tgggaagtaaatacattcat

SEQ ID NO: 11065 - DNA, 20 bp, Artificial Sequence
  Description of Artificial Sequence: Synthetic oligonucleotide
  Target: APOC3; (-) strand; PAM type: YTN; PAM sequence: CTC
agactttgggaagtaaatac

SEQ ID NO: 11066 - DNA, 20 bp, Artificial Sequence
  Description of Artificial Sequence: Synthetic oligonucleotide
  Target: APOC3; (-) strand; PAM type: YTN; PAM sequence: TTG
atgcaaaacgtaccctcaga

SEQ ID NO: 11067 - DNA, 20 bp, Artificial Sequence
  Description of Artificial Sequence: Synthetic oligonucleotide
  Target: APOC3; (-) strand; PAM type: YTN; PAM sequence: CTA
cagattgatgcaaaacgtac

SEQ ID NO: 11068 - DNA, 20 bp, Artificial Sequence
  Description of Artificial Sequence: Synthetic oligonucleotide
  Target: APOC3; (-) strand; PAM type: YTN; PAM sequence: CTC
cccaaaacaaatccatctac

SEQ ID NO: 11069 - DNA, 20 bp, Artificial Sequence
  Description of Artificial Sequence: Synthetic oligonucleotide
  Target: APOC3; (-) strand; PAM type: YTN; PAM sequence: CTG
ctccccaaaacaaatccatc

SEQ ID NO: 11070 - DNA, 20 bp, Artificial Sequence
  Description of Artificial Sequence: Synthetic oligonucleotide
  Target: APOC3; (-) strand; PAM type: YTN; PAM sequence: CTC
cctgctccccaaaacaaatc

SEQ ID NO: 11071 - DNA, 20 bp, Artificial Sequence
  Description of Artificial Sequence: Synthetic oligonucleotide
  Target: APOC3; (-) strand; PAM type: YTN; PAM sequence: CTC
tccctgctccccaaaacaaa

SEQ ID NO: 11072 - DNA, 20 bp, Artificial Sequence
  Description of Artificial Sequence: Synthetic oligonucleotide
  Target: APOC3; (-) strand; PAM type: YTN; PAM sequence: TTC
tctccctgctccccaaaaca

SEQ ID NO: 11073 - DNA, 20 bp, Artificial Sequence
  Description of Artificial Sequence: Synthetic oligonucleotide
  Target: APOC3; (-) strand; PAM type: YTN; PAM sequence: CTC
attctctccctgctccccaa

SEQ ID NO: 11074 - DNA, 20 bp, Artificial Sequence
  Description of Artificial Sequence: Synthetic oligonucleotide
  Target: APOC3; (-) strand; PAM type: YTN; PAM sequence: CTC
tcattctctccctgctcccc

SEQ ID NO: 11075 - DNA, 20 bp, Artificial Sequence
  Description of Artificial Sequence: Synthetic oligonucleotide
  Target: APOC3; (-) strand; PAM type: YTN; PAM sequence: CTG
agcacagggggctctcattc

SEQ ID NO: 11076 - DNA, 20 bp, Artificial Sequence
  Description of Artificial Sequence: Synthetic oligonucleotide
  Target: APOC3; (-) strand; PAM type: YTN; PAM sequence: CTA
agactgagcacagggggctc

SEQ ID NO: 11077 - DNA, 20 bp, Artificial Sequence
  Description of Artificial Sequence: Synthetic oligonucleotide
  Target: APOC3; (-) strand; PAM type: YTN; PAM sequence: CTC
taagactgagcacagggggc

SEQ ID NO: 11078 - DNA, 20 bp, Artificial Sequence
  Description of Artificial Sequence: Synthetic oligonucleotide
  Target: APOC3; (-) strand; PAM type: YTN; PAM sequence: TTG
caccctctaagactgagcac

SEQ ID NO: 11079 - DNA, 20 bp, Artificial Sequence
  Description of Artificial Sequence: Synthetic oligonucleotide
  Target: APOC3; (-) strand; PAM type: YTN; PAM sequence: CTT
gcaccctctaagactgagca

SEQ ID NO: 11080 - DNA, 20 bp, Artificial Sequence
  Description of Artificial Sequence: Synthetic oligonucleotide
  Target: APOC3; (-) strand; PAM type: YTN; PAM sequence: CTA
cttgcaccctctaagactga

SEQ ID NO: 11081 - DNA, 20 bp, Artificial Sequence
  Description of Artificial Sequence: Synthetic oligonucleotide
  Target: APOC3; (-) strand; PAM type: YTN; PAM sequence: TTC
ccatcagctacttgcaccct

SEQ ID NO: 11082 - DNA, 20 bp, Artificial Sequence
  Description of Artificial Sequence: Synthetic oligonucleotide
  Target: APOC3; (-) strand; PAM type: YTN; PAM sequence: CTT
cccatcagctacttgcaccc

SEQ ID NO: 11083 - DNA, 20 bp, Artificial Sequence
  Description of Artificial Sequence: Synthetic oligonucleotide
  Target: APOC3; (-) strand; PAM type: YTN; PAM sequence: CTC
ttcccatcagctacttgcac

SEQ ID NO: 11084 - DNA, 20 bp, Artificial Sequence
  Description of Artificial Sequence: Synthetic oligonucleotide
  Target: APOC3; (-) strand; PAM type: YTN; PAM sequence: CTG
ctcttcccatcagctacttg

SEQ ID NO: 11085 - DNA, 20 bp, Artificial Sequence
  Description of Artificial Sequence: Synthetic oligonucleotide
  Target: APOC3; (-) strand; PAM type: YTN; PAM sequence: CTG
gaaggcagtctgctcttccc

SEQ ID NO: 11086 - DNA, 20 bp, Artificial Sequence
  Description of Artificial Sequence: Synthetic oligonucleotide
  Target: APOC3; (-) strand; PAM type: YTN; PAM sequence: CTG
gctggaaggcagtctgctct

SEQ ID NO: 11087 - DNA, 20 bp, Artificial Sequence
  Description of Artificial Sequence: Synthetic oligonucleotide
  Target: APOC3; (-) strand; PAM type: YTN; PAM sequence: CTC
acaggaccaggcctggctgg

SEQ ID NO: 11088 - DNA, 20 bp, Artificial Sequence
  Description of Artificial Sequence: Synthetic oligonucleotide
  Target: APOC3; (-) strand; PAM type: YTN; PAM sequence: CTG
actcacaggaccaggcctgg

SEQ ID NO: 11089 - DNA, 20 bp, Artificial Sequence
  Description of Artificial Sequence: Synthetic oligonucleotide
  Target: APOC3; (-) strand; PAM type: YTN; PAM sequence: CTA
agatggacgtccctgactca

SEQ ID NO: 11090 - DNA, 20 bp, Artificial Sequence
  Description of Artificial Sequence: Synthetic oligonucleotide
  Target: APOC3; (-) strand; PAM type: YTN; PAM sequence: TTC
atgcccactaagatggacgt

SEQ ID NO: 11091 - DNA, 20 bp, Artificial Sequence
  Description of Artificial Sequence: Synthetic oligonucleotide
  Target: APOC3; (-) strand; PAM type: YTN; PAM sequence: TTT
catgcccactaagatggacg

SEQ ID NO: 11092 - DNA, 20 bp, Artificial Sequence
  Description of Artificial Sequence: Synthetic oligonucleotide
  Target: APOC3; (-) strand; PAM type: YTN; PAM sequence: CTT
tcatgcccactaagatggac

SEQ ID NO: 11093 - DNA, 20 bp, Artificial Sequence
  Description of Artificial Sequence: Synthetic oligonucleotide
  Target: APOC3; (-) strand; PAM type: YTN; PAM sequence: CTC
gagatcacacaggcctttca

SEQ ID NO: 11094 - DNA, 20 bp, Artificial Sequence
  Description of Artificial Sequence: Synthetic oligonucleotide
  Target: APOC3; (-) strand; PAM type: YTN; PAM sequence: CTC
cctcgagatcacacaggcct

SEQ ID NO: 11095 - DNA, 20 bp, Artificial Sequence
  Description of Artificial Sequence: Synthetic oligonucleotide
  Target: APOC3; (-) strand; PAM type: YTN; PAM sequence: TTG
gagaggcgatgtctccctcg

SEQ ID NO: 11096 - DNA, 20 bp, Artificial Sequence
  Description of Artificial Sequence: Synthetic oligonucleotide
  Target: APOC3; (-) strand; PAM type: YTN; PAM sequence: CTT
ggagaggcgatgtctccctc

SEQ ID NO: 11097 - DNA, 20 bp, Artificial Sequence
  Description of Artificial Sequence: Synthetic oligonucleotide
  Target: APOC3; (-) strand; PAM type: YTN; PAM sequence: TTG
cacagataaggagaggcttg

SEQ ID NO: 11098 - DNA, 20 bp, Artificial Sequence
  Description of Artificial Sequence: Synthetic oligonucleotide
  Target: APOC3; (-) strand; PAM type: YTN; PAM sequence: CTG
ttgcacagataaggagaggc

SEQ ID NO: 11099 - DNA, 20 bp, Artificial Sequence
  Description of Artificial Sequence: Synthetic oligonucleotide
  Target: APOC3; (-) strand; PAM type: YTN; PAM sequence: CTG
cctgttgcacagataaggag

SEQ ID NO: 11100 - DNA, 20 bp, Artificial Sequence
  Description of Artificial Sequence: Synthetic oligonucleotide
  Target: APOC3; (-) strand; PAM type: YTN; PAM sequence: TTA
agtctgcctgttgcacagat

SEQ ID NO: 11101 - DNA, 20 bp, Artificial Sequence
  Description of Artificial Sequence: Synthetic oligonucleotide
  Target: APOC3; (-) strand; PAM type: YTN; PAM sequence: CTC
accaatcattaagtctgcct

SEQ ID NO: 11102 - DNA, 20 bp, Artificial Sequence
  Description of Artificial Sequence: Synthetic oligonucleotide
  Target: APOC3; (-) strand; PAM type: YTN; PAM sequence: TTG
cctcaccaatcattaagtct

SEQ ID NO: 11103 - DNA, 20 bp, Artificial Sequence
  Description of Artificial Sequence: Synthetic oligonucleotide
  Target: APOC3; (-) strand; PAM type: YTN; PAM sequence: CTC
attgcctcaccaatcattaa

SEQ ID NO: 11104 - DNA, 20 bp, Artificial Sequence
  Description of Artificial Sequence: Synthetic oligonucleotide
  Target: APOC3; (-) strand; PAM type: YTN; PAM sequence: CTA
tcagcctcattgcctcacca

SEQ ID NO: 11105 - DNA, 20 bp, Artificial Sequence
  Description of Artificial Sequence: Synthetic oligonucleotide
  Target: APOC3; (-) strand; PAM type: YTN; PAM sequence: CTG
agctatcagcctcattgcct

SEQ ID NO: 11106 - DNA, 20 bp, Artificial Sequence
  Description of Artificial Sequence: Synthetic oligonucleotide
  Target: APOC3; (-) strand; PAM type: YTN; PAM sequence: CTA
atgctgagctatcagcctca

SEQ ID NO: 11107 - DNA, 20 bp, Artificial Sequence
  Description of Artificial Sequence: Synthetic oligonucleotide
  Target: APOC3; (-) strand; PAM type: YTN; PAM sequence: CTG
tagctaatgctgagctatca

SEQ ID NO: 11108 - DNA, 20 bp, Artificial Sequence
  Description of Artificial Sequence: Synthetic oligonucleotide
  Target: APOC3; (-) strand; PAM type: YTN; PAM sequence: TTG
gccaggaggggtggctgtag

SEQ ID NO: 11109 - DNA, 20 bp, Artificial Sequence
  Description of Artificial Sequence: Synthetic oligonucleotide
  Target: APOC3; (-) strand; PAM type: YTN; PAM sequence: CTG
tgtggttggccaggaggggt

SEQ ID NO: 11110 - DNA, 20 bp, Artificial Sequence
  Description of Artificial Sequence: Synthetic oligonucleotide
  Target: APOC3; (-) strand; PAM type: YTN; PAM sequence: TTG
atccctgtgtggttggccag

SEQ ID NO: 11111 - DNA, 20 bp, Artificial Sequence
  Description of Artificial Sequence: Synthetic oligonucleotide
  Target: APOC3; (-) strand; PAM type: YTN; PAM sequence: TTT
gatccctgtgtggttggcca

SEQ ID NO: 11112 - DNA, 20 bp, Artificial Sequence
  Description of Artificial Sequence: Synthetic oligonucleotide
  Target: APOC3; (-) strand; PAM type: YTN; PAM sequence: CTG
gtttgatccctgtgtggttg

SEQ ID NO: 11113 - DNA, 20 bp, Artificial Sequence
  Description of Artificial Sequence: Synthetic oligonucleotide
  Target: APOC3; (-) strand; PAM type: YTN; PAM sequence: CTG
acccctggtttgatccctgt

SEQ ID NO: 11114 - DNA, 20 bp, Artificial Sequence
  Description of Artificial Sequence: Synthetic oligonucleotide
  Target: APOC3; (-) strand; PAM type: YTN; PAM sequence: CTG
gactgacccctggtttgatc

SEQ ID NO: 11115 - DNA, 20 bp, Artificial Sequence
  Description of Artificial Sequence: Synthetic oligonucleotide
  Target: APOC3; (-) strand; PAM type: YTN; PAM sequence: CTC
tggactgacccctggtttga

SEQ ID NO: 11116 - DNA, 20 bp, Artificial Sequence
  Description of Artificial Sequence: Synthetic oligonucleotide
  Target: APOC3; (-) strand; PAM type: YTN; PAM sequence: CTG
acctctggactgacccctgg

SEQ ID NO: 11117 - DNA, 20 bp, Artificial Sequence
  Description of Artificial Sequence: Synthetic oligonucleotide
  Target: APOC3; (-) strand; PAM type: YTN; PAM sequence: CTC
tgacctctggactgacccct

SEQ ID NO: 11118 - DNA, 20 bp, Artificial Sequence
  Description of Artificial Sequence: Synthetic oligonucleotide
  Target: APOC3; (-) strand; PAM type: YTN; PAM sequence: CTG
actctgacctctggactgac

SEQ ID NO: 11119 - DNA, 20 bp, Artificial Sequence
  Description of Artificial Sequence: Synthetic oligonucleotide
  Target: APOC3; (-) strand; PAM type: YTN; PAM sequence: CTC
ctgactctgacctctggact

SEQ ID NO: 11120 - DNA, 20 bp, Artificial Sequence
  Description of Artificial Sequence: Synthetic oligonucleotide
  Target: APOC3; (-) strand; PAM type: YTN; PAM sequence: CTG
ctcctgactctgacctctgg

SEQ ID NO: 11121 - DNA, 20 bp, Artificial Sequence
  Description of Artificial Sequence: Synthetic oligonucleotide
  Target: APOC3; (-) strand; PAM type: YTN; PAM sequence: TTG
tctgctcctgactctgacct

SEQ ID NO: 11122 - DNA, 20 bp, Artificial Sequence
  Description of Artificial Sequence: Synthetic oligonucleotide
  Target: APOC3; (-) strand; PAM type: YTN; PAM sequence: CTG
agttgtctgctcctgactct

SEQ ID NO: 11123 - DNA, 20 bp, Artificial Sequence
  Description of Artificial Sequence: Synthetic oligonucleotide
  Target: APOC3; (-) strand; PAM type: YTN; PAM sequence: CTG
gatctgagttgtctgctcct

SEQ ID NO: 11124 - DNA, 20 bp, Artificial Sequence
  Description of Artificial Sequence: Synthetic oligonucleotide
  Target: APOC3; (-) strand; PAM type: YTN; PAM sequence: CTG
gctggatctgagttgtctgc

SEQ ID NO: 11125 - DNA, 20 bp, Artificial Sequence
  Description of Artificial Sequence: Synthetic oligonucleotide
  Target: APOC3; (-) strand; PAM type: YTN; PAM sequence: CTG
tccctggctggatctgagtt

SEQ ID NO: 11126 - DNA, 20 bp, Artificial Sequence
  Description of Artificial Sequence: Synthetic oligonucleotide
  Target: APOC3; (-) strand; PAM type: YTN; PAM sequence: CTG
cctgtccctggctggatctg

SEQ ID NO: 11127 - DNA, 20 bp, Artificial Sequence
  Description of Artificial Sequence: Synthetic oligonucleotide
  Target: APOC3; (-) strand; PAM type: YTN; PAM sequence: TTG
aagcatacgtgaggcacatg

SEQ ID NO: 11128 - DNA, 20 bp, Artificial Sequence
  Description of Artificial Sequence: Synthetic oligonucleotide
  Target: APOC3; (-) strand; PAM type: YTN; PAM sequence: CTT
gaagcatacgtgaggcacat

SEQ ID NO: 11129 - DNA, 20 bp, Artificial Sequence
  Description of Artificial Sequence: Synthetic oligonucleotide
  Target: APOC3; (-) strand; PAM type: YTN; PAM sequence: CTG
cccgggggagggccccttga

SEQ ID NO: 11130 - DNA, 20 bp, Artificial Sequence
  Description of Artificial Sequence: Synthetic oligonucleotide
  Target: APOC3; (-) strand; PAM type: YTN; PAM sequence: TTC
tgcccgggggagggcccctt

SEQ ID NO: 11131 - DNA, 20 bp, Artificial Sequence
  Description of Artificial Sequence: Synthetic oligonucleotide
  Target: APOC3; (-) strand; PAM type: YTN; PAM sequence: TTC
agttctgcccgggggagggc

SEQ ID NO: 11132 - DNA, 20 bp, Artificial Sequence
  Description of Artificial Sequence: Synthetic oligonucleotide
  Target: APOC3; (-) strand; PAM type: YTN; PAM sequence: CTT
cagttctgcccgggggaggg

SEQ ID NO: 11133 - DNA, 20 bp, Artificial Sequence
  Description of Artificial Sequence: Synthetic oligonucleotide
  Target: APOC3; (-) strand; PAM type: YTN; PAM sequence: CTG
tccttcagttctgcccgggg

SEQ ID NO: 11134 - DNA, 20 bp, Artificial Sequence
  Description of Artificial Sequence: Synthetic oligonucleotide
  Target: APOC3; (-) strand; PAM type: YTN; PAM sequence: CTA
tggcaacaggagctgtcctt

SEQ ID NO: 11135 - DNA, 20 bp, Artificial Sequence
  Description of Artificial Sequence: Synthetic oligonucleotide
  Target: APOC3; (-) strand; PAM type: YTN; PAM sequence: CTC
ctatggcaacaggagctgtc

SEQ ID NO: 11136 - DNA, 20 bp, Artificial Sequence
  Description of Artificial Sequence: Synthetic oligonucleotide
  Target: APOC3; (-) strand; PAM type: YTN; PAM sequence: CTC
cctcctatggcaacaggagc

SEQ ID NO: 11137 - DNA, 20 bp, Artificial Sequence
  Description of Artificial Sequence: Synthetic oligonucleotide
  Target: APOC3; (-) strand; PAM type: YTN; PAM sequence: CTC
acccagctccctcctatggc

SEQ ID NO: 11138 - DNA, 20 bp, Artificial Sequence
  Description of Artificial Sequence: Synthetic oligonucleotide
  Target: APOC3; (-) strand; PAM type: YTN; PAM sequence: CTA
gtatctcacccagctccctc

SEQ ID NO: 11139 - DNA, 20 bp, Artificial Sequence
  Description of Artificial Sequence: Synthetic oligonucleotide
  Target: APOC3; (-) strand; PAM type: YTN; PAM sequence: CTC
ctagtatctcacccagctcc

SEQ ID NO: 11140 - DNA, 20 bp, Artificial Sequence
  Description of Artificial Sequence: Synthetic oligonucleotide
  Target: APOC3; (-) strand; PAM type: YTN; PAM sequence: TTC
ctcctagtatctcacccagc

SEQ ID NO: 11141 - DNA, 20 bp, Artificial Sequence
  Description of Artificial Sequence: Synthetic oligonucleotide
  Target: APOC3; (-) strand; PAM type: YTN; PAM sequence: TTC
atcacacatcatcatgccgg

SEQ ID NO: 11142 - DNA, 20 bp, Artificial Sequence
  Description of Artificial Sequence: Synthetic oligonucleotide
  Target: APOC3; (-) strand; PAM type: YTN; PAM sequence: TTG
ttcatcacacatcatcatgc

SEQ ID NO: 11143 - DNA, 20 bp, Artificial Sequence
  Description of Artificial Sequence: Synthetic oligonucleotide
  Target: APOC3; (-) strand; PAM type: YTN; PAM sequence: CTT
gttcatcacacatcatcatg

SEQ ID NO: 11144 - DNA, 20 bp, Artificial Sequence
  Description of Artificial Sequence: Synthetic oligonucleotide
  Target: APOC3; (-) strand; PAM type: YTN; PAM sequence: TTG
gccagaggcccttgttcatc

SEQ ID NO: 11145 - DNA, 20 bp, Artificial Sequence
  Description of Artificial Sequence: Synthetic oligonucleotide
  Target: APOC3; (-) strand; PAM type: YTN; PAM sequence: CTG
ttggccagaggcccttgttc

SEQ ID NO: 11146 - DNA, 20 bp, Artificial Sequence
  Description of Artificial Sequence: Synthetic oligonucleotide
  Target: APOC3; (-) strand; PAM type: YTN; PAM sequence: TTC
agacctgttggccagaggcc

SEQ ID NO: 11147 - DNA, 20 bp, Artificial Sequence
  Description of Artificial Sequence: Synthetic oligonucleotide
  Target: APOC3; (-) strand; PAM type: YTN; PAM sequence: CTG
attcagacctgttggccaga

SEQ ID NO: 11148 - DNA, 20 bp, Artificial Sequence
  Description of Artificial Sequence: Synthetic oligonucleotide
  Target: APOC3; (-) strand; PAM type: YTN; PAM sequence: CTG
ggcagccctgattcagacct

SEQ ID NO: 11149 - DNA, 20 bp, Artificial Sequence
  Description of Artificial Sequence: Synthetic oligonucleotide
  Target: APOC3; (-) strand; PAM type: YTN; PAM sequence: CTG
ggctgggcagccctgattca

SEQ ID NO: 11150 - DNA, 20 bp, Artificial Sequence
  Description of Artificial Sequence: Synthetic oligonucleotide
  Target: APOC3; (-) strand; PAM type: YTN; PAM sequence: TTC
ccaccaggctgggctgggca

SEQ ID NO: 11151 - DNA, 20 bp, Artificial Sequence
  Description of Artificial Sequence: Synthetic oligonucleotide
  Target: APOC3; (-) strand; PAM type: YTN; PAM sequence: CTT
cccaccaggctgggctgggc

SEQ ID NO: 11152 - DNA, 20 bp, Artificial Sequence
  Description of Artificial Sequence: Synthetic oligonucleotide
  Target: APOC3; (-) strand; PAM type: YTN; PAM sequence: CTC
catgcccttcccaccaggct

SEQ ID NO: 11153 - DNA, 20 bp, Artificial Sequence
  Description of Artificial Sequence: Synthetic oligonucleotide
  Target: APOC3; (-) strand; PAM type: YTN; PAM sequence: TTA
gtacatgagcccccatgctc

SEQ ID NO: 11154 - DNA, 20 bp, Artificial Sequence
  Description of Artificial Sequence: Synthetic oligonucleotide
  Target: APOC3; (-) strand; PAM type: YTN; PAM sequence: TTT
agtacatgagcccccatgct

SEQ ID NO: 11155 - DNA, 20 bp, Artificial Sequence
  Description of Artificial Sequence: Synthetic oligonucleotide
  Target: APOC3; (-) strand; PAM type: YTN; PAM sequence: TTG
tgtccaggtgaggtttagta

SEQ ID NO: 11156 - DNA, 20 bp, Artificial Sequence
  Description of Artificial Sequence: Synthetic oligonucleotide
  Target: APOC3; (-) strand; PAM type: YTN; PAM sequence: CTT
gtgtccaggtgaggtttagt

SEQ ID NO: 11157 - DNA, 20 bp, Artificial Sequence
  Description of Artificial Sequence: Synthetic oligonucleotide
  Target: APOC3; (-) strand; PAM type: YTN; PAM sequence: TTC
accttgtgtccaggtgaggt

SEQ ID NO: 11158 - DNA, 20 bp, Artificial Sequence
  Description of Artificial Sequence: Synthetic oligonucleotide
  Target: APOC3; (-) strand; PAM type: YTN; PAM sequence: TTT
caccttgtgtccaggtgagg

SEQ ID NO: 11159 - DNA, 20 bp, Artificial Sequence
  Description of Artificial Sequence: Synthetic oligonucleotide
  Target: APOC3; (-) strand; PAM type: YTN; PAM sequence: CTG
tttcaccttgtgtccaggtg

SEQ ID NO: 11160 - DNA, 20 bp, Artificial Sequence
  Description of Artificial Sequence: Synthetic oligonucleotide
  Target: APOC3; (-) strand; PAM type: YTN; PAM sequence: TTG
ggctgtttcaccttgtgtcc

SEQ ID NO: 11161 - DNA, 20 bp, Artificial Sequence
  Description of Artificial Sequence: Synthetic oligonucleotide
  Target: APOC3; (-) strand; PAM type: YTN; PAM sequence: CTG
gggttgggctgtttcacctt

SEQ ID NO: 11162 - DNA, 20 bp, Artificial Sequence
  Description of Artificial Sequence: Synthetic oligonucleotide
  Target: APOC3; (-) strand; PAM type: YTN; PAM sequence: CTC
tggggttgggctgtttcacc

SEQ ID NO: 11163 - DNA, 20 bp, Artificial Sequence
  Description of Artificial Sequence: Synthetic oligonucleotide
  Target: APOC3; (-) strand; PAM type: YTN; PAM sequence: TTG
accatccggggccaaaaatg

SEQ ID NO: 11164 - DNA, 20 bp, Artificial Sequence
  Description of Artificial Sequence: Synthetic oligonucleotide
  Target: APOC3; (-) strand; PAM type: YTN; PAM sequence: TTT
gaccatccggggccaaaaat

SEQ ID NO: 11165 - DNA, 20 bp, Artificial Sequence
  Description of Artificial Sequence: Synthetic oligonucleotide
  Target: APOC3; (-) strand; PAM type: YTN; PAM sequence: CTC
cagggagaagccagtggtag

SEQ ID NO: 11166 - DNA, 20 bp, Artificial Sequence
  Description of Artificial Sequence: Synthetic oligonucleotide
  Target: APOC3; (-) strand; PAM type: YTN; PAM sequence: CTG
ctccagggagaagccagtgg

SEQ ID NO: 11167 - DNA, 20 bp, Artificial Sequence
  Description of Artificial Sequence: Synthetic oligonucleotide
  Target: APOC3; (-) strand; PAM type: YTN; PAM sequence: CTG
ggatgaagactgctccaggg

SEQ ID NO: 11168 - DNA, 20 bp, Artificial Sequence
  Description of Artificial Sequence: Synthetic oligonucleotide
  Target: APOC3; (-) strand; PAM type: YTN; PAM sequence: CTC
ccctgggatgaagactgctc

SEQ ID NO: 11169 - DNA, 20 bp, Artificial Sequence
  Description of Artificial Sequence: Synthetic oligonucleotide
  Target: APOC3; (-) strand; PAM type: YTN; PAM sequence: CTC
ccatcatggctcccctggga

SEQ ID NO: 11170 - DNA, 20 bp, Artificial Sequence
  Description of Artificial Sequence: Synthetic oligonucleotide
  Target: APOC3; (-) strand; PAM type: YTN; PAM sequence: CTC
tcccatcatggctcccctgg

SEQ ID NO: 11171 - DNA, 20 bp, Artificial Sequence
  Description of Artificial Sequence: Synthetic oligonucleotide
  Target: APOC3; (-) strand; PAM type: YTN; PAM sequence: CTC
tctcccatcatggctcccct

SEQ ID NO: 11172 - DNA, 20 bp, Artificial Sequence
  Description of Artificial Sequence: Synthetic oligonucleotide
  Target: APOC3; (-) strand; PAM type: YTN; PAM sequence: CTG
cccctctctcccatcatggc

SEQ ID NO: 11173 - DNA, 20 bp, Artificial Sequence
  Description of Artificial Sequence: Synthetic oligonucleotide
  Target: APOC3; (-) strand; PAM type: YTN; PAM sequence: CTG
cgctgcccctctctcccatc

SEQ ID NO: 11174 - DNA, 20 bp, Artificial Sequence
  Description of Artificial Sequence: Synthetic oligonucleotide
  Target: APOC3; (-) strand; PAM type: YTN; PAM sequence: TTG
gtggccagcctgcgctgccc

SEQ ID NO: 11175 - DNA, 20 bp, Artificial Sequence
  Description of Artificial Sequence: Synthetic oligonucleotide
  Target: APOC3; (-) strand; PAM type: YTN; PAM sequence: CTT
ggtggccagcctgcgctgcc

SEQ ID NO: 11176 - DNA, 20 bp, Artificial Sequence
  Description of Artificial Sequence: Synthetic oligonucleotide
  Target: APOC3; (-) strand; PAM type: YTN; PAM sequence: CTC
ttggtggccagcctgcgctg

SEQ ID NO: 11177 - DNA, 20 bp, Artificial Sequence
  Description of Artificial Sequence: Synthetic oligonucleotide
  Target: APOC3; (-) strand; PAM type: YTN; PAM sequence: CTG
caccccggcaggggatctct

SEQ ID NO: 11178 - DNA, 20 bp, Artificial Sequence
  Description of Artificial Sequence: Synthetic oligonucleotide
  Target: APOC3; (-) strand; PAM type: YTN; PAM sequence: CTC
accaacagtccaacctgcac

SEQ ID NO: 11179 - DNA, 20 bp, Artificial Sequence
  Description of Artificial Sequence: Synthetic oligonucleotide
  Target: APOC3; (-) strand; PAM type: YTN; PAM sequence: CTG
tggcccctcaccaacagtcc

SEQ ID NO: 11180 - DNA, 20 bp, Artificial Sequence
  Description of Artificial Sequence: Synthetic oligonucleotide
  Target: APOC3; (-) strand; PAM type: YTN; PAM sequence: CTG
agaatacctgtggcccctca

SEQ ID NO: 11181 - DNA, 20 bp, Artificial Sequence
  Description of Artificial Sequence: Synthetic oligonucleotide
  Target: APOC3; (-) strand; PAM type: YTN; PAM sequence: TTG
gtacctgagaatacctgtgg

SEQ ID NO: 11182 - DNA, 20 bp, Artificial Sequence
  Description of Artificial Sequence: Synthetic oligonucleotide
  Target: APOC3; (-) strand; PAM type: YTN; PAM sequence: CTT
ggtacctgagaatacctgtg

SEQ ID NO: 11183 - DNA, 20 bp, Artificial Sequence
  Description of Artificial Sequence: Synthetic oligonucleotide
  Target: APOC3; (-) strand; PAM type: YTN; PAM sequence: TTC
caagggcttggtacctgaga

SEQ ID NO: 11184 - DNA, 20 bp, Artificial Sequence
  Description of Artificial Sequence: Synthetic oligonucleotide
  Target: APOC3; (-) strand; PAM type: YTN; PAM sequence: CTT
ccaagggcttggtacctgag

SEQ ID NO: 11185 - DNA, 20 bp, Artificial Sequence
  Description of Artificial Sequence: Synthetic oligonucleotide
  Target: APOC3; (-) strand; PAM type: YTN; PAM sequence: CTC
cttccaagggcttggtacct

SEQ ID NO: 11186 - DNA, 20 bp, Artificial Sequence
  Description of Artificial Sequence: Synthetic oligonucleotide
  Target: APOC3; (-) strand; PAM type: YTN; PAM sequence: TTG
tctccttccaagggcttggt

SEQ ID NO: 11187 - DNA, 20 bp, Artificial Sequence
  Description of Artificial Sequence: Synthetic oligonucleotide
  Target: APOC3; (-) strand; PAM type: YTN; PAM sequence: CTT
gtctccttccaagggcttgg

SEQ ID NO: 11188 - DNA, 20 bp, Artificial Sequence
  Description of Artificial Sequence: Synthetic oligonucleotide
  Target: APOC3; (-) strand; PAM type: YTN; PAM sequence: CTG
gtaccttgtctccttccaag

SEQ ID NO: 11189 - DNA, 20 bp, Artificial Sequence
  Description of Artificial Sequence: Synthetic oligonucleotide
  Target: APOC3; (-) strand; PAM type: YTN; PAM sequence: CTC
caggaagcctggtaccttgt

SEQ ID NO: 11190 - DNA, 20 bp, Artificial Sequence
  Description of Artificial Sequence: Synthetic oligonucleotide
  Target: APOC3; (-) strand; PAM type: YTN; PAM sequence: CTA
gatgtagcacacctccagga

SEQ ID NO: 11191 - DNA, 20 bp, Artificial Sequence
  Description of Artificial Sequence: Synthetic oligonucleotide
  Target: APOC3; (-) strand; PAM type: YTN; PAM sequence: CTG
agctagatgtagcacacctc

SEQ ID NO: 11192 - DNA, 20 bp, Artificial Sequence
  Description of Artificial Sequence: Synthetic oligonucleotide
  Target: APOC3; (-) strand; PAM type: YTN; PAM sequence: CTG
gcagggtgctgagctagatg

SEQ ID NO: 11193 - DNA, 20 bp, Artificial Sequence
  Description of Artificial Sequence: Synthetic oligonucleotide
  Target: APOC3; (-) strand; PAM type: YTN; PAM sequence: CTC
ccgcatggcaacggacccag

SEQ ID NO: 11194 - DNA, 20 bp, Artificial Sequence
  Description of Artificial Sequence: Synthetic oligonucleotide
  Target: APOC3; (-) strand; PAM type: YTN; PAM sequence: CTC
tcccgcatggcaacggaccc

SEQ ID NO: 11195 - DNA, 20 bp, Artificial Sequence
  Description of Artificial Sequence: Synthetic oligonucleotide
  Target: APOC3; (-) strand; PAM type: YTN; PAM sequence: CTC
tctcccgcatggcaacggac

SEQ ID NO: 11196 - DNA, 20 bp, Artificial Sequence
  Description of Artificial Sequence: Synthetic oligonucleotide
  Target: APOC3; (-) strand; PAM type: YTN; PAM sequence: CTC
tctctcccgcatggcaacgg

SEQ ID NO: 11197 - DNA, 20 bp, Artificial Sequence
  Description of Artificial Sequence: Synthetic oligonucleotide
  Target: APOC3; (-) strand; PAM type: YTN; PAM sequence: CTG
gcctctctctcccgcatggc

SEQ ID NO: 11198 - DNA, 20 bp, Artificial Sequence
  Description of Artificial Sequence: Synthetic oligonucleotide
  Target: APOC3; (-) strand; PAM type: YTN; PAM sequence: CTG
gaggagcctggcctctctct

SEQ ID NO: 11199 - DNA, 20 bp, Artificial Sequence
  Description of Artificial Sequence: Synthetic oligonucleotide
  Target: APOC3; (-) strand; PAM type: YTN; PAM sequence: CTG
cagagggtctggaggagcct

SEQ ID NO: 11200 - DNA, 20 bp, Artificial Sequence
  Description of Artificial Sequence: Synthetic oligonucleotide
  Target: APOC3; (-) strand; PAM type: YTN; PAM sequence: CTC
tgcagagggtctggaggagc

SEQ ID NO: 11201 - DNA, 20 bp, Artificial Sequence
  Description of Artificial Sequence: Synthetic oligonucleotide
  Target: APOC3; (-) strand; PAM type: YTN; PAM sequence: TTC
catctctgcagagggtctgg

SEQ ID NO: 11202 - DNA, 20 bp, Artificial Sequence
  Description of Artificial Sequence: Synthetic oligonucleotide
  Target: APOC3; (-) strand; PAM type: YTN; PAM sequence: TTT
ccatctctgcagagggtctg

SEQ ID NO: 11203 - DNA, 20 bp, Artificial Sequence
  Description of Artificial Sequence: Synthetic oligonucleotide
  Target: APOC3; (-) strand; PAM type: YTN; PAM sequence: CTT
tccatctctgcagagggtct

SEQ ID NO: 11204 - DNA, 20 bp, Artificial Sequence
  Description of Artificial Sequence: Synthetic oligonucleotide
  Target: APOC3; (-) strand; PAM type: YTN; PAM sequence: CTC
caagcctttccatctctgca

SEQ ID NO: 11205 - DNA, 20 bp, Artificial Sequence
  Description of Artificial Sequence: Synthetic oligonucleotide
  Target: APOC3; (-) strand; PAM type: YTN; PAM sequence: CTG
gcggggtcccgtggccccag

SEQ ID NO: 11206 - DNA, 20 bp, Artificial Sequence
  Description of Artificial Sequence: Synthetic oligonucleotide
  Target: APOC3; (-) strand; PAM type: YTN; PAM sequence: CTA
gaatgggctggcggggtccc

SEQ ID NO: 11207 - DNA, 20 bp, Artificial Sequence
  Description of Artificial Sequence: Synthetic oligonucleotide
  Target: APOC3; (-) strand; PAM type: YTN; PAM sequence: CTA
tgggcccgggtgtgctagaa

SEQ ID NO: 11208 - DNA, 20 bp, Artificial Sequence
  Description of Artificial Sequence: Synthetic oligonucleotide
  Target: APOC3; (-) strand; PAM type: YTN; PAM sequence: CTC
catagccccagaggcaaagg

SEQ ID NO: 11209 - DNA, 20 bp, Artificial Sequence
  Description of Artificial Sequence: Synthetic oligonucleotide
  Target: APOC3; (-) strand; PAM type: YTN; PAM sequence: CTG
ctccatagccccagaggcaa

SEQ ID NO: 11210 - DNA, 20 bp, Artificial Sequence
  Description of Artificial Sequence: Synthetic oligonucleotide
  Target: APOC3; (-) strand; PAM type: YTN; PAM sequence: CTG
cggcctgctccatagcccca

SEQ ID NO: 11211 - DNA, 20 bp, Artificial Sequence
  Description of Artificial Sequence: Synthetic oligonucleotide
  Target: APOC3; (-) strand; PAM type: YTN; PAM sequence: CTG
ctgcggcctgctccatagcc

SEQ ID NO: 11212 - DNA, 20 bp, Artificial Sequence
  Description of Artificial Sequence: Synthetic oligonucleotide
  Target: APOC3; (-) strand; PAM type: YTN; PAM sequence: TTC
tgctgcggcctgctccatag

SEQ ID NO: 11213 - DNA, 20 bp, Artificial Sequence
  Description of Artificial Sequence: Synthetic oligonucleotide
  Target: APOC3; (-) strand; PAM type: YTN; PAM sequence: CTT
ctgctgcggcctgctccata

SEQ ID NO: 11214 - DNA, 20 bp, Artificial Sequence
  Description of Artificial Sequence: Synthetic oligonucleotide
  Target: APOC3; (-) strand; PAM type: YTN; PAM sequence: CTC
ttctgctgcggcctgctcca

SEQ ID NO: 11215 - DNA, 20 bp, Artificial Sequence
  Description of Artificial Sequence: Synthetic oligonucleotide
  Target: APOC3; (-) strand; PAM type: YTN; PAM sequence: TTC
ctcttctgctgcggcctgct

SEQ ID NO: 11216 - DNA, 20 bp, Artificial Sequence
  Description of Artificial Sequence: Synthetic oligonucleotide
  Target: APOC3; (-) strand; PAM type: YTN; PAM sequence: TTT
cctcttctgctgcggcctgc

SEQ ID NO: 11217 - DNA, 20 bp, Artificial Sequence
  Description of Artificial Sequence: Synthetic oligonucleotide
  Target: APOC3; (-) strand; PAM type: YTN; PAM sequence: CTT
tcctcttctgctgcggcctg

SEQ ID NO: 11218 - DNA, 20 bp, Artificial Sequence
  Description of Artificial Sequence: Synthetic oligonucleotide
  Target: APOC3; (-) strand; PAM type: YTN; PAM sequence: TTG
gggatgccctttcctcttct

SEQ ID NO: 11219 - DNA, 20 bp, Artificial Sequence
  Description of Artificial Sequence: Synthetic oligonucleotide
  Target: APOC3; (-) strand; PAM type: YTN; PAM sequence: TTG
gtattggggatgccctttcc

SEQ ID NO: 11220 - DNA, 20 bp, Artificial Sequence
  Description of Artificial Sequence: Synthetic oligonucleotide
  Target: APOC3; (-) strand; PAM type: YTN; PAM sequence: TTT
ggtattggggatgccctttc

SEQ ID NO: 11221 - DNA, 20 bp, Artificial Sequence
  Description of Artificial Sequence: Synthetic oligonucleotide
  Target: APOC3; (-) strand; PAM type: YTN; PAM sequence: CTG
gaggatttggtattggggat

SEQ ID NO: 11222 - DNA, 20 bp, Artificial Sequence
  Description of Artificial Sequence: Synthetic oligonucleotide
  Target: APOC3; (-) strand; PAM type: YTN; PAM sequence: TTG
gtggtggggtagaaggtgaa

SEQ ID NO: 11223 - DNA, 20 bp, Artificial Sequence
  Description of Artificial Sequence: Synthetic oligonucleotide
  Target: APOC3; (-) strand; PAM type: YTN; PAM sequence: TTT
ggtggtggggtagaaggtga

SEQ ID NO: 11224 - DNA, 20 bp, Artificial Sequence
  Description of Artificial Sequence: Synthetic oligonucleotide
  Target: APOC3; (-) strand; PAM type: YTN; PAM sequence: CTT
tggtggtggggtagaaggtg

SEQ ID NO: 11225 - DNA, 20 bp, Artificial Sequence
  Description of Artificial Sequence: Synthetic oligonucleotide
  Target: APOC3; (-) strand; PAM type: YTN; PAM sequence: CTG
cagactttggtggtggggta

SEQ ID NO: 11226 - DNA, 20 bp, Artificial Sequence
  Description of Artificial Sequence: Synthetic oligonucleotide
  Target: APOC3; (-) strand; PAM type: YTN; PAM sequence: CTC
ctgcagactttggtggtggg

SEQ ID NO: 11227 - DNA, 20 bp, Artificial Sequence
  Description of Artificial Sequence: Synthetic oligonucleotide
  Target: APOC3; (-) strand; PAM type: YTN; PAM sequence: CTC
aagtctcctgcagactttgg

SEQ ID NO: 11228 - DNA, 20 bp, Artificial Sequence
  Description of Artificial Sequence: Synthetic oligonucleotide
  Target: APOC3; (-) strand; PAM type: YTN; PAM sequence: CTG
tctcaagtctcctgcagact

SEQ ID NO: 11229 - DNA, 20 bp, Artificial Sequence
  Description of Artificial Sequence: Synthetic oligonucleotide
  Target: APOC3; (-) strand; PAM type: YTN; PAM sequence: CTA
tagaggcatcagtcacacgc

SEQ ID NO: 11230 - DNA, 20 bp, Artificial Sequence
  Description of Artificial Sequence: Synthetic oligonucleotide
  Target: APOC3; (-) strand; PAM type: YTN; PAM sequence: CTG
agacccctatagaggcatca

SEQ ID NO: 11231 - DNA, 20 bp, Artificial Sequence
  Description of Artificial Sequence: Synthetic oligonucleotide
  Target: APOC3; (-) strand; PAM type: YTN; PAM sequence: TTA
gagcactgagacccctatag

SEQ ID NO: 11232 - DNA, 20 bp, Artificial Sequence
  Description of Artificial Sequence: Synthetic oligonucleotide
  Target: APOC3; (-) strand; PAM type: YTN; PAM sequence: CTT
agagcactgagacccctata

SEQ ID NO: 11233 - DNA, 20 bp, Artificial Sequence
  Description of Artificial Sequence: Synthetic oligonucleotide
  Target: APOC3; (-) strand; PAM type: YTN; PAM sequence: TTC
acacaccccaggcaaatacc

SEQ ID NO: 11234 - DNA, 20 bp, Artificial Sequence
  Description of Artificial Sequence: Synthetic oligonucleotide
  Target: APOC3; (-) strand; PAM type: YTN; PAM sequence: CTT
cacacaccccaggcaaatac

SEQ ID NO: 11235 - DNA, 20 bp, Artificial Sequence
  Description of Artificial Sequence: Synthetic oligonucleotide
  Target: APOC3; (-) strand; PAM type: YTN; PAM sequence: TTA
atccaggtcttcacacaccc

SEQ ID NO: 11236 - DNA, 20 bp, Artificial Sequence
  Description of Artificial Sequence: Synthetic oligonucleotide
  Target: APOC3; (-) strand; PAM type: YTN; PAM sequence: CTT
aatccaggtcttcacacacc

SEQ ID NO: 11237 - DNA, 20 bp, Artificial Sequence
  Description of Artificial Sequence: Synthetic oligonucleotide
  Target: APOC3; (-) strand; PAM type: YTN; PAM sequence: CTG
ggaaccttaatccaggtctt

SEQ ID NO: 11238 - DNA, 20 bp, Artificial Sequence
  Description of Artificial Sequence: Synthetic oligonucleotide
  Target: APOC3; (-) strand; PAM type: YTN; PAM sequence: TTA
gtagtaaggctgggaacctt

SEQ ID NO: 11239 - DNA, 20 bp, Artificial Sequence
  Description of Artificial Sequence: Synthetic oligonucleotide
  Target: APOC3; (-) strand; PAM type: YTN; PAM sequence: CTC
caagtgcacagcccattagt

SEQ ID NO: 11240 - DNA, 20 bp, Artificial Sequence
  Description of Artificial Sequence: Synthetic oligonucleotide
  Target: APOC3; (-) strand; PAM type: YTN; PAM sequence: CTA
agggctccaagtgcacagcc

SEQ ID NO: 11241 - DNA, 20 bp, Artificial Sequence
  Description of Artificial Sequence: Synthetic oligonucleotide
  Target: APOC3; (-) strand; PAM type: YTN; PAM sequence: CTC
taagggctccaagtgcacag

SEQ ID NO: 11242 - DNA, 20 bp, Artificial Sequence
  Description of Artificial Sequence: Synthetic oligonucleotide
  Target: APOC3; (-) strand; PAM type: YTN; PAM sequence: CTA
aggctctaagggctccaagt

SEQ ID NO: 11243 - DNA, 20 bp, Artificial Sequence
  Description of Artificial Sequence: Synthetic oligonucleotide
  Target: APOC3; (-) strand; PAM type: YTN; PAM sequence: TTA
gaaacctaaggctctaaggg

SEQ ID NO: 11244 - DNA, 20 bp, Artificial Sequence
  Description of Artificial Sequence: Synthetic oligonucleotide
  Target: APOC3; (-) strand; PAM type: YTN; PAM sequence: TTA
taggttagaaacctaaggct

SEQ ID NO: 11245 - DNA, 20 bp, Artificial Sequence
  Description of Artificial Sequence: Synthetic oligonucleotide
  Target: APOC3; (-) strand; PAM type: YTN; PAM sequence: TTT
ataggttagaaacctaaggc

SEQ ID NO: 11246 - DNA, 20 bp, Artificial Sequence
  Description of Artificial Sequence: Synthetic oligonucleotide
  Target: APOC3; (-) strand; PAM type: YTN; PAM sequence: TTT
tataggttagaaacctaagg

SEQ ID NO: 11247 - DNA, 20 bp, Artificial Sequence
  Description of Artificial Sequence: Synthetic oligonucleotide
  Target: APOC3; (-) strand; PAM type: YTN; PAM sequence: TTA
agtccattttataggttaga

SEQ ID NO: 11248 - DNA, 20 bp, Artificial Sequence
  Description of Artificial Sequence: Synthetic oligonucleotide
  Target: APOC3; (-) strand; PAM type: YTN; PAM sequence: CTG
tgaagtagacgttaagtcca

SEQ ID NO: 11249 - DNA, 20 bp, Artificial Sequence
  Description of Artificial Sequence: Synthetic oligonucleotide
  Target: APOC3; (-) strand; PAM type: YTN; PAM sequence: TTA
aaatgcaaatagaaccctgt

SEQ ID NO: 11250 - DNA, 20 bp, Artificial Sequence
  Description of Artificial Sequence: Synthetic oligonucleotide
  Target: APOC3; (-) strand; PAM type: YTN; PAM sequence: CTG
ttaaaatgcaaatagaaccc

SEQ ID NO: 11251 - DNA, 20 bp, Artificial Sequence
  Description of Artificial Sequence: Synthetic oligonucleotide
  Target: APOC3; (-) strand; PAM type: YTN; PAM sequence: TTC
tgttaaaatgcaaatagaac

SEQ ID NO: 11252 - DNA, 20 bp, Artificial Sequence
  Description of Artificial Sequence: Synthetic oligonucleotide
  Target: APOC3; (-) strand; PAM type: YTN; PAM sequence: TTT
ctgttaaaatgcaaatagaa

SEQ ID NO: 11253 - DNA, 20 bp, Artificial Sequence
  Description of Artificial Sequence: Synthetic oligonucleotide
  Target: APOC3; (-) strand; PAM type: YTN; PAM sequence: TTT
tctgttaaaatgcaaataga

SEQ ID NO: 11254 - DNA, 20 bp, Artificial Sequence
  Description of Artificial Sequence: Synthetic oligonucleotide
  Target: APOC3; (-) strand; PAM type: YTN; PAM sequence: TTG
ttttctgttaaaatgcaaat

SEQ ID NO: 11255 - DNA, 20 bp, Artificial Sequence
  Description of Artificial Sequence: Synthetic oligonucleotide
  Target: APOC3; (-) strand; PAM type: YTN; PAM sequence: TTT
gttttctgttaaaatgcaaa

SEQ ID NO: 11256 - DNA, 20 bp, Artificial Sequence
  Description of Artificial Sequence: Synthetic oligonucleotide
  Target: APOC3; (-) strand; PAM type: YTN; PAM sequence: CTT
tgttttctgttaaaatgcaa

SEQ ID NO: 11257 - DNA, 20 bp, Artificial Sequence
  Description of Artificial Sequence: Synthetic oligonucleotide
  Target: APOC3; (-) strand; PAM type: YTN; PAM sequence: TTA
agactttgttttctgttaaa

SEQ ID NO: 11258 - DNA, 20 bp, Artificial Sequence
  Description of Artificial Sequence: Synthetic oligonucleotide
  Target: APOC3; (-) strand; PAM type: YTN; PAM sequence: CTT
aagactttgttttctgttaa

SEQ ID NO: 11259 - DNA, 20 bp, Artificial Sequence
  Description of Artificial Sequence: Synthetic oligonucleotide
  Target: APOC3; (-) strand; PAM type: YTN; PAM sequence: TTG
acttaagactttgttttctg

SEQ ID NO: 11260 - DNA, 20 bp, Artificial Sequence
  Description of Artificial Sequence: Synthetic oligonucleotide
  Target: APOC3; (-) strand; PAM type: YTN; PAM sequence: TTT
gacttaagactttgttttct

SEQ ID NO: 11261 - DNA, 20 bp, Artificial Sequence
  Description of Artificial Sequence: Synthetic oligonucleotide
  Target: APOC3; (-) strand; PAM type: YTN; PAM sequence: CTT
tgacttaagactttgttttc

SEQ ID NO: 11262 - DNA, 20 bp, Artificial Sequence
  Description of Artificial Sequence: Synthetic oligonucleotide
  Target: APOC3; (-) strand; PAM type: YTN; PAM sequence: TTC
ctttgacttaagactttgtt

SEQ ID NO: 11263 - DNA, 20 bp, Artificial Sequence
  Description of Artificial Sequence: Synthetic oligonucleotide
  Target: APOC3; (-) strand; PAM type: YTN; PAM sequence: TTC
attcctttgacttaagactt

SEQ ID NO: 11264 - DNA, 20 bp, Artificial Sequence
  Description of Artificial Sequence: Synthetic oligonucleotide
  Target: APOC3; (-) strand; PAM type: YTN; PAM sequence: CTA
aaaaagagagagagagagag

SEQ ID NO: 11265 - DNA, 20 bp, Artificial Sequence
  Description of Artificial Sequence: Synthetic oligonucleotide
  Target: APOC3; (-) strand; PAM type: YTN; PAM sequence: TTG
gtctaaaaaagagagagaga

SEQ ID NO: 11266 - DNA, 20 bp, Artificial Sequence
  Description of Artificial Sequence: Synthetic oligonucleotide
  Target: APOC3; (-) strand; PAM type: YTN; PAM sequence: CTT
ggtctaaaaaagagagagag

SEQ ID NO: 11267 - DNA, 20 bp, Artificial Sequence
  Description of Artificial Sequence: Synthetic oligonucleotide
  Target: APOC3; (-) strand; PAM type: YTN; PAM sequence: CTA
gacttggtctaaaaaagaga

SEQ ID NO: 11268 - DNA, 20 bp, Artificial Sequence
  Description of Artificial Sequence: Synthetic oligonucleotide
  Target: APOC3; (-) strand; PAM type: YTN; PAM sequence: CTC
cagtgacagagctagacttg

SEQ ID NO: 11269 - DNA, 20 bp, Artificial Sequence
  Description of Artificial Sequence: Synthetic oligonucleotide
  Target: APOC3; (-) strand; PAM type: YTN; PAM sequence: TTG
cactccagtgacagagctag

SEQ ID NO: 11270 - DNA, 20 bp, Artificial Sequence
  Description of Artificial Sequence: Synthetic oligonucleotide
  Target: APOC3; (-) strand; PAM type: YTN; PAM sequence: TTG
cagtgagcagagatcgcacc

SEQ ID NO: 11271 - DNA, 20 bp, Artificial Sequence
  Description of Artificial Sequence: Synthetic oligonucleotide
  Target: APOC3; (-) strand; PAM type: YTN; PAM sequence: TTG
aaccccggaggtggaggttg

SEQ ID NO: 11272 - DNA, 20 bp, Artificial Sequence
  Description of Artificial Sequence: Synthetic oligonucleotide
  Target: APOC3; (-) strand; PAM type: YTN; PAM sequence: CTT
gaaccccggaggtggaggtt

SEQ ID NO: 11273 - DNA, 20 bp, Artificial Sequence
  Description of Artificial Sequence: Synthetic oligonucleotide
  Target: APOC3; (-) strand; PAM type: YTN; PAM sequence: TTG
cttgaaccccggaggtggag

SEQ ID NO: 11274 - DNA, 20 bp, Artificial Sequence
  Description of Artificial Sequence: Synthetic oligonucleotide
  Target: APOC3; (-) strand; PAM type: YTN; PAM sequence: CTG
aggcacgagaattgcttgaa

SEQ ID NO: 11275 - DNA, 20 bp, Artificial Sequence
  Description of Artificial Sequence: Synthetic oligonucleotide
  Target: APOC3; (-) strand; PAM type: YTN; PAM sequence: CTC
aggaggctgaggcacgagaa

SEQ ID NO: 11276 - DNA, 20 bp, Artificial Sequence
  Description of Artificial Sequence: Synthetic oligonucleotide
  Target: APOC3; (-) strand; PAM type: YTN; PAM sequence: CTA
ctcaggaggctgaggcacga

SEQ ID NO: 11277 - DNA, 20 bp, Artificial Sequence
  Description of Artificial Sequence: Synthetic oligonucleotide
  Target: APOC3; (-) strand; PAM type: YTN; PAM sequence: CTG
tagtcccagctactcaggag

SEQ ID NO: 11278 - DNA, 20 bp, Artificial Sequence
  Description of Artificial Sequence: Synthetic oligonucleotide
  Target: APOC3; (-) strand; PAM type: YTN; PAM sequence: TTA
gccgagcatggtgatgcacg

SEQ ID NO: 11279 - DNA, 20 bp, Artificial Sequence
  Description of Artificial Sequence: Synthetic oligonucleotide
  Target: APOC3; (-) strand; PAM type: YTN; PAM sequence: CTA
aaaatacaaaaaattagccg

SEQ ID NO: 11280 - DNA, 20 bp, Artificial Sequence
  Description of Artificial Sequence: Synthetic oligonucleotide
  Target: APOC3; (-) strand; PAM type: YTN; PAM sequence: CTA
ctaaaaatacaaaaaattag

SEQ ID NO: 11281 - DNA, 20 bp, Artificial Sequence
  Description of Artificial Sequence: Synthetic oligonucleotide
  Target: APOC3; (-) strand; PAM type: YTN; PAM sequence: CTC
tactaaaaatacaaaaaatt

SEQ ID NO: 11282 - DNA, 20 bp, Artificial Sequence
  Description of Artificial Sequence: Synthetic oligonucleotide
  Target: APOC3; (-) strand; PAM type: YTN; PAM sequence: CTG
ggcaacatggcgaaacccag

SEQ ID NO: 11283 - DNA, 20 bp, Artificial Sequence
  Description of Artificial Sequence: Synthetic oligonucleotide
  Target: APOC3; (-) strand; PAM type: YTN; PAM sequence: TTC
gagaccagcctgggcaacat

SEQ ID NO: 11284 - DNA, 20 bp, Artificial Sequence
  Description of Artificial Sequence: Synthetic oligonucleotide
  Target: APOC3; (-) strand; PAM type: YTN; PAM sequence: CTG
aggccaggagttcgagacca

SEQ ID NO: 11285 - DNA, 20 bp, Artificial Sequence
  Description of Artificial Sequence: Synthetic oligonucleotide
  Target: APOC3; (-) strand; PAM type: YTN; PAM sequence: CTG
ggacggacggatatctgagg

SEQ ID NO: 11286 - DNA, 20 bp, Artificial Sequence
  Description of Artificial Sequence: Synthetic oligonucleotide
  Target: APOC3; (-) strand; PAM type: YTN; PAM sequence: TTG
ggaggctgggacggacggat

SEQ ID NO: 11287 - DNA, 20 bp, Artificial Sequence
  Description of Artificial Sequence: Synthetic oligonucleotide
  Target: APOC3; (-) strand; PAM type: YTN; PAM sequence: TTT
gggaggctgggacggacgga

SEQ ID NO: 11288 - DNA, 20 bp, Artificial Sequence
  Description of Artificial Sequence: Synthetic oligonucleotide
  Target: APOC3; (-) strand; PAM type: YTN; PAM sequence: CTT
tgggaggctgggacggacgg

SEQ ID NO: 11289 - DNA, 20 bp, Artificial Sequence
  Description of Artificial Sequence: Synthetic oligonucleotide
  Target: APOC3; (-) strand; PAM type: YTN; PAM sequence: CTG
taatcccagcactttgggag

SEQ ID NO: 11290 - DNA, 20 bp, Artificial Sequence
  Description of Artificial Sequence: Synthetic oligonucleotide
  Target: APOC3; (-) strand; PAM type: YTN; PAM sequence: CTC
atgcctgtaatcccagcact

SEQ ID NO: 11291 - DNA, 20 bp, Artificial Sequence
  Description of Artificial Sequence: Synthetic oligonucleotide
  Target: APOC3; (-) strand; PAM type: YTN; PAM sequence: CTG
ggcacagtggctcatgcctg

SEQ ID NO: 11292 - DNA, 20 bp, Artificial Sequence
  Description of Artificial Sequence: Synthetic oligonucleotide
  Target: APOC3; (-) strand; PAM type: YTN; PAM sequence: CTG
gctgggcacagtggctcatg

SEQ ID NO: 11293 - DNA, 20 bp, Artificial Sequence
  Description of Artificial Sequence: Synthetic oligonucleotide
  Target: APOC3; (-) strand; PAM type: YTN; PAM sequence: TTC
ctggctgggcacagtggctc

SEQ ID NO: 11294 - DNA, 20 bp, Artificial Sequence
  Description of Artificial Sequence: Synthetic oligonucleotide
  Target: APOC3; (-) strand; PAM type: YTN; PAM sequence: TTA
gcgatccattcctggctggg

SEQ ID NO: 11295 - DNA, 20 bp, Artificial Sequence
  Description of Artificial Sequence: Synthetic oligonucleotide
  Target: APOC3; (-) strand; PAM type: YTN; PAM sequence: CTA
ttagcgatccattcctggct

SEQ ID NO: 11296 - DNA, 20 bp, Artificial Sequence
  Description of Artificial Sequence: Synthetic oligonucleotide
  Target: APOC3; (-) strand; PAM type: YTN; PAM sequence: CTC
tattagcgatccattcctgg

SEQ ID NO: 11297 - DNA, 20 bp, Artificial Sequence
  Description of Artificial Sequence: Synthetic oligonucleotide
  Target: APOC3; (-) strand; PAM type: YTN; PAM sequence: TTC
ctctattagcgatccattcc

SEQ ID NO: 11298 - DNA, 20 bp, Artificial Sequence
  Description of Artificial Sequence: Synthetic oligonucleotide
  Target: APOC3; (-) strand; PAM type: YTN; PAM sequence: TTG
gaattcctctattagcgatc

SEQ ID NO: 11299 - DNA, 20 bp, Artificial Sequence
  Description of Artificial Sequence: Synthetic oligonucleotide
  Target: APOC3; (-) strand; PAM type: YTN; PAM sequence: CTT
ggaattcctctattagcgat

SEQ ID NO: 11300 - DNA, 20 bp, Artificial Sequence
  Description of Artificial Sequence: Synthetic oligonucleotide
  Target: APOC3; (-) strand; PAM type: YTN; PAM sequence: TTA
tcggtgggtgagacttggaa

SEQ ID NO: 11301 - DNA, 20 bp, Artificial Sequence
  Description of Artificial Sequence: Synthetic oligonucleotide
  Target: APOC3; (-) strand; PAM type: YTN; PAM sequence: TTT
atcggtgggtgagacttgga

SEQ ID NO: 11302 - DNA, 20 bp, Artificial Sequence
  Description of Artificial Sequence: Synthetic oligonucleotide
  Target: APOC3; (-) strand; PAM type: YTN; PAM sequence: CTT
tatcggtgggtgagacttgg

SEQ ID NO: 11303 - DNA, 20 bp, Artificial Sequence
  Description of Artificial Sequence: Synthetic oligonucleotide
  Target: APOC3; (-) strand; PAM type: YTN; PAM sequence: TTC
tttatcggtgggtgagactt

SEQ ID NO: 11304 - DNA, 20 bp, Artificial Sequence
  Description of Artificial Sequence: Synthetic oligonucleotide
  Target: APOC3; (-) strand; PAM type: YTN; PAM sequence: CTC
agaattctttatcggtgggt

SEQ ID NO: 11305 - DNA, 20 bp, Artificial Sequence
  Description of Artificial Sequence: Synthetic oligonucleotide
  Target: APOC3; (-) strand; PAM type: YTN; PAM sequence: CTG
ccctcagaattctttatcgg

SEQ ID NO: 11306 - DNA, 20 bp, Artificial Sequence
  Description of Artificial Sequence: Synthetic oligonucleotide
  Target: APOC3; (-) strand; PAM type: YTN; PAM sequence: CTC
tgccctcagaattctttatc

SEQ ID NO: 11307 - DNA, 20 bp, Artificial Sequence
  Description of Artificial Sequence: Synthetic oligonucleotide
  Target: APOC3; (-) strand; PAM type: YTN; PAM sequence: CTG
agaaagtggcccggctctgc

SEQ ID NO: 11308 - DNA, 20 bp, Artificial Sequence
  Description of Artificial Sequence: Synthetic oligonucleotide
  Target: APOC3; (-) strand; PAM type: YTN; PAM sequence: CTA
acaccacagtatgaaatcag

SEQ ID NO: 11309 - DNA, 20 bp, Artificial Sequence
  Description of Artificial Sequence: Synthetic oligonucleotide
  Target: APOC3; (-) strand; PAM type: YTN; PAM sequence: CTC
agaagtaactaacaccacag

SEQ ID NO: 11310 - DNA, 20 bp, Artificial Sequence
  Description of Artificial Sequence: Synthetic oligonucleotide
  Target: APOC3; (-) strand; PAM type: YTN; PAM sequence: CTC
tcagaagtaactaacaccac

SEQ ID NO: 11311 - DNA, 20 bp, Artificial Sequence
  Description of Artificial Sequence: Synthetic oligonucleotide
  Target: APOC3; (-) strand; PAM type: YTN; PAM sequence: CTG
tcctctcagaagtaactaac

SEQ ID NO: 11312 - DNA, 20 bp, Artificial Sequence
  Description of Artificial Sequence: Synthetic oligonucleotide
  Target: APOC3; (-) strand; PAM type: YTN; PAM sequence: CTG
gcagcaagctgtcctctcag

SEQ ID NO: 11313 - DNA, 20 bp, Artificial Sequence
  Description of Artificial Sequence: Synthetic oligonucleotide
  Target: APOC3; (-) strand; PAM type: YTN; PAM sequence: CTC
tggcagcaagctgtcctctc

SEQ ID NO: 11314 - DNA, 20 bp, Artificial Sequence
  Description of Artificial Sequence: Synthetic oligonucleotide
  Target: APOC3; (-) strand; PAM type: YTN; PAM sequence: CTA
acataaaaaatagagctctg

SEQ ID NO: 11315 - DNA, 20 bp, Artificial Sequence
  Description of Artificial Sequence: Synthetic oligonucleotide
  Target: APOC3; (-) strand; PAM type: YTN; PAM sequence: CTC
taacataaaaaatagagctc

SEQ ID NO: 11316 - DNA, 20 bp, Artificial Sequence
  Description of Artificial Sequence: Synthetic oligonucleotide
  Target: APOC3; (-) strand; PAM type: YTN; PAM sequence: CTG
caggcagaaggagcctctaa

SEQ ID NO: 11317 - DNA, 20 bp, Artificial Sequence
  Description of Artificial Sequence: Synthetic oligonucleotide
  Target: APOC3; (-) strand; PAM type: YTN; PAM sequence: TTC
ccagacagcagagtctgcag

SEQ ID NO: 11318 - DNA, 20 bp, Artificial Sequence
  Description of Artificial Sequence: Synthetic oligonucleotide
  Target: APOC3; (-) strand; PAM type: YTN; PAM sequence: CTT
cccagacagcagagtctgca

SEQ ID NO: 11319 - DNA, 20 bp, Artificial Sequence
  Description of Artificial Sequence: Synthetic oligonucleotide
  Target: APOC3; (-) strand; PAM type: YTN; PAM sequence: CTG
tgcccttcccagacagcaga

SEQ ID NO: 11320 - DNA, 20 bp, Artificial Sequence
  Description of Artificial Sequence: Synthetic oligonucleotide
  Target: APOC3; (-) strand; PAM type: YTN; PAM sequence: CTA
acgctgtgcccttcccagac

SEQ ID NO: 11321 - DNA, 20 bp, Artificial Sequence
  Description of Artificial Sequence: Synthetic oligonucleotide
  Target: APOC3; (-) strand; PAM type: YTN; PAM sequence: CTC
ctaacgctgtgcccttccca

SEQ ID NO: 11322 - DNA, 20 bp, Artificial Sequence
  Description of Artificial Sequence: Synthetic oligonucleotide
  Target: APOC3; (-) strand; PAM type: YTN; PAM sequence: CTC
cctcctaacgctgtgccctt

SEQ ID NO: 11323 - DNA, 20 bp, Artificial Sequence
  Description of Artificial Sequence: Synthetic oligonucleotide
  Target: APOC3; (-) strand; PAM type: YTN; PAM sequence: CTC
tccctcctaacgctgtgccc

SEQ ID NO: 11324 - DNA, 20 bp, Artificial Sequence
  Description of Artificial Sequence: Synthetic oligonucleotide
  Target: APOC3; (-) strand; PAM type: YTN; PAM sequence: CTC
cctctccctcctaacgctgt

SEQ ID NO: 11325 - DNA, 20 bp, Artificial Sequence
  Description of Artificial Sequence: Synthetic oligonucleotide
  Target: APOC3; (-) strand; PAM type: YTN; PAM sequence: CTC
acacctccctctccctccta

SEQ ID NO: 11326 - DNA, 20 bp, Artificial Sequence
  Description of Artificial Sequence: Synthetic oligonucleotide
  Target: APOC3; (-) strand; PAM type: YTN; PAM sequence: CTG
aaaaggaaatgagatagaga

SEQ ID NO: 11327 - DNA, 20 bp, Artificial Sequence
  Description of Artificial Sequence: Synthetic oligonucleotide
  Target: APOC3; (-) strand; PAM type: YTN; PAM sequence: TTG
cccagagtggtgctgaaaag

SEQ ID NO: 11328 - DNA, 20 bp, Artificial Sequence
  Description of Artificial Sequence: Synthetic oligonucleotide
  Target: APOC3; (-) strand; PAM type: YTN; PAM sequence: CTG
attgcccagagtggtgctga

SEQ ID NO: 11329 - DNA, 20 bp, Artificial Sequence
  Description of Artificial Sequence: Synthetic oligonucleotide
  Target: APOC3; (-) strand; PAM type: YTN; PAM sequence: CTG
gaatactgattgcccagagt

SEQ ID NO: 11330 - DNA, 20 bp, Artificial Sequence
  Description of Artificial Sequence: Synthetic oligonucleotide
  Target: APOC3; (-) strand; PAM type: YTN; PAM sequence: CTG
aggataaaatggggctggaa

SEQ ID NO: 11331 - DNA, 20 bp, Artificial Sequence
  Description of Artificial Sequence: Synthetic oligonucleotide
  Target: APOC3; (-) strand; PAM type: YTN; PAM sequence: TTC
tgaggataaaatggggctgg

SEQ ID NO: 11332 - DNA, 20 bp, Artificial Sequence
  Description of Artificial Sequence: Synthetic oligonucleotide
  Target: APOC3; (-) strand; PAM type: YTN; PAM sequence: TTT
ctgaggataaaatggggctg

SEQ ID NO: 11333 - DNA, 20 bp, Artificial Sequence
  Description of Artificial Sequence: Synthetic oligonucleotide
  Target: APOC3; (-) strand; PAM type: YTN; PAM sequence: TTT
tctgaggataaaatggggct

SEQ ID NO: 11334 - DNA, 20 bp, Artificial Sequence
  Description of Artificial Sequence: Synthetic oligonucleotide
  Target: APOC3; (-) strand; PAM type: YTN; PAM sequence: CTC
aattttctgaggataaaatg

SEQ ID NO: 11335 - DNA, 20 bp, Artificial Sequence
  Description of Artificial Sequence: Synthetic oligonucleotide
  Target: APOC3; (-) strand; PAM type: YTN; PAM sequence: CTC
agagcctcaattttctgagg

SEQ ID NO: 11336 - DNA, 20 bp, Artificial Sequence
  Description of Artificial Sequence: Synthetic oligonucleotide
  Target: APOC3; (-) strand; PAM type: YTN; PAM sequence: TTG
gcacgtaataggacccaggt

SEQ ID NO: 11337 - DNA, 20 bp, Artificial Sequence
  Description of Artificial Sequence: Synthetic oligonucleotide
  Target: APOC3; (-) strand; PAM type: YTN; PAM sequence: TTT
ggcacgtaataggacccagg

SEQ ID NO: 11338 - DNA, 20 bp, Artificial Sequence
  Description of Artificial Sequence: Synthetic oligonucleotide
  Target: APOC3; (-) strand; PAM type: YTN; PAM sequence: CTT
tggcacgtaataggacccag

SEQ ID NO: 11339 - DNA, 20 bp, Artificial Sequence
  Description of Artificial Sequence: Synthetic oligonucleotide
  Target: APOC3; (-) strand; PAM type: YTN; PAM sequence: TTA
aatgatgcctttggcacgta

SEQ ID NO: 11340 - DNA, 20 bp, Artificial Sequence
  Description of Artificial Sequence: Synthetic oligonucleotide
  Target: APOC3; (-) strand; PAM type: YTN; PAM sequence: CTT
aaatgatgcctttggcacgt

SEQ ID NO: 11341 - DNA, 20 bp, Artificial Sequence
  Description of Artificial Sequence: Synthetic oligonucleotide
  Target: APOC3; (-) strand; PAM type: YTN; PAM sequence: TTA
ggcttaaatgatgcctttgg

SEQ ID NO: 11342 - DNA, 20 bp, Artificial Sequence
  Description of Artificial Sequence: Synthetic oligonucleotide
  Target: APOC3; (-) strand; PAM type: YTN; PAM sequence: CTT
aggcttaaatgatgcctttg

SEQ ID NO: 11343 - DNA, 20 bp, Artificial Sequence
  Description of Artificial Sequence: Synthetic oligonucleotide
  Target: APOC3; (-) strand; PAM type: YTN; PAM sequence: TTG
gagccaggacatcttaggct

SEQ ID NO: 11344 - DNA, 20 bp, Artificial Sequence
  Description of Artificial Sequence: Synthetic oligonucleotide
  Target: APOC3; (-) strand; PAM type: YTN; PAM sequence: CTT
ggagccaggacatcttaggc

SEQ ID NO: 11345 - DNA, 20 bp, Artificial Sequence
  Description of Artificial Sequence: Synthetic oligonucleotide
  Target: APOC3; (-) strand; PAM type: YTN; PAM sequence: CTG
acaccttggagccaggacat

SEQ ID NO: 11346 - DNA, 20 bp, Artificial Sequence
  Description of Artificial Sequence: Synthetic oligonucleotide
  Target: APOC3; (-) strand; PAM type: YTN; PAM sequence: TTC
cagatgctgacaccttggag

SEQ ID NO: 11347 - DNA, 20 bp, Artificial Sequence
  Description of Artificial Sequence: Synthetic oligonucleotide
  Target: APOC3; (-) strand; PAM type: YTN; PAM sequence: CTT
ccagatgctgacaccttgga

SEQ ID NO: 11348 - DNA, 20 bp, Artificial Sequence
  Description of Artificial Sequence: Synthetic oligonucleotide
  Target: APOC3; (-) strand; PAM type: YTN; PAM sequence: CTG
tcttccagatgctgacacct

SEQ ID NO: 11349 - DNA, 20 bp, Artificial Sequence
  Description of Artificial Sequence: Synthetic oligonucleotide
  Target: APOC3; (-) strand; PAM type: YTN; PAM sequence: CTG
ggcccacagtgaagccgcag

SEQ ID NO: 11350 - DNA, 20 bp, Artificial Sequence
  Description of Artificial Sequence: Synthetic oligonucleotide
  Target: APOC3; (-) strand; PAM type: YTN; PAM sequence: CTG
agatgtcccctgggcccaca

SEQ ID NO: 11351 - DNA, 20 bp, Artificial Sequence
  Description of Artificial Sequence: Synthetic oligonucleotide
  Target: APOC3; (-) strand; PAM type: YTN; PAM sequence: CTC
ggggctgagatgtcccctgg

SEQ ID NO: 11352 - DNA, 20 bp, Artificial Sequence
  Description of Artificial Sequence: Synthetic oligonucleotide
  Target: APOC3; (-) strand; PAM type: YTN; PAM sequence: TTC
tcggggctgagatgtcccct

SEQ ID NO: 11353 - DNA, 20 bp, Artificial Sequence
  Description of Artificial Sequence: Synthetic oligonucleotide
  Target: APOC3; (-) strand; PAM type: YTN; PAM sequence: CTT
ctcggggctgagatgtcccc

SEQ ID NO: 11354 - DNA, 20 bp, Artificial Sequence
  Description of Artificial Sequence: Synthetic oligonucleotide
  Target: APOC3; (-) strand; PAM type: YTN; PAM sequence: CTG
acccttctcggggctgagat

SEQ ID NO: 11355 - DNA, 20 bp, Artificial Sequence
  Description of Artificial Sequence: Synthetic oligonucleotide
  Target: APOC3; (-) strand; PAM type: YTN; PAM sequence: CTG
cggggagtcggtggtccagg

SEQ ID NO: 11356 - DNA, 20 bp, Artificial Sequence
  Description of Artificial Sequence: Synthetic oligonucleotide
  Target: APOC3; (-) strand; PAM type: YTN; PAM sequence: TTC
tgcggggagtcggtggtcca

SEQ ID NO: 11357 - DNA, 20 bp, Artificial Sequence
  Description of Artificial Sequence: Synthetic oligonucleotide
  Target: APOC3; (-) strand; PAM type: YTN; PAM sequence: CTG
gtgaggagagggcacagagg

SEQ ID NO: 11358 - DNA, 20 bp, Artificial Sequence
  Description of Artificial Sequence: Synthetic oligonucleotide
  Target: APOC3; (-) strand; PAM type: YTN; PAM sequence: CTG
ggaggaacaaggtctggtga

SEQ ID NO: 11359 - DNA, 20 bp, Artificial Sequence
  Description of Artificial Sequence: Synthetic oligonucleotide
  Target: APOC3; (-) strand; PAM type: YTN; PAM sequence: CTG
tgggagcaactgggaggaac

SEQ ID NO: 11360 - DNA, 20 bp, Artificial Sequence
  Description of Artificial Sequence: Synthetic oligonucleotide
  Target: APOC3; (-) strand; PAM type: YTN; PAM sequence: CTG
gctgtgggagcaactgggag

SEQ ID NO: 11361 - DNA, 20 bp, Artificial Sequence
  Description of Artificial Sequence: Synthetic oligonucleotide
  Target: APOC3; (-) strand; PAM type: YTN; PAM sequence: CTG
ccccctggctgtgggagcaa

SEQ ID NO: 11362 - DNA, 20 bp, Artificial Sequence
  Description of Artificial Sequence: Synthetic oligonucleotide
  Target: APOC3; (-) strand; PAM type: YTN; PAM sequence: CTC
actgccccctggctgtggga

SEQ ID NO: 11363 - DNA, 20 bp, Artificial Sequence
  Description of Artificial Sequence: Synthetic oligonucleotide
  Target: APOC3; (-) strand; PAM type: YTN; PAM sequence: CTG
ggggaagagcagccctcact

SEQ ID NO: 11364 - DNA, 20 bp, Artificial Sequence
  Description of Artificial Sequence: Synthetic oligonucleotide
  Target: APOC3; (-) strand; PAM type: YTN; PAM sequence: CTC
agtggggctgggggaagagc

SEQ ID NO: 11365 - DNA, 20 bp, Artificial Sequence
  Description of Artificial Sequence: Synthetic oligonucleotide
  Target: APOC3; (-) strand; PAM type: YTN; PAM sequence: TTC
ctcagtggggctgggggaag

SEQ ID NO: 11366 - DNA, 20 bp, Artificial Sequence
  Description of Artificial Sequence: Synthetic oligonucleotide
  Target: APOC3; (-) strand; PAM type: YTN; PAM sequence: CTG
ggttcctcagtggggctggg

SEQ ID NO: 11367 - DNA, 20 bp, Artificial Sequence
  Description of Artificial Sequence: Synthetic oligonucleotide
  Target: APOC3; (-) strand; PAM type: YTN; PAM sequence: TTC
ctgggttcctcagtggggct

SEQ ID NO: 11368 - DNA, 20 bp, Artificial Sequence
  Description of Artificial Sequence: Synthetic oligonucleotide
  Target: APOC3; (-) strand; PAM type: YTN; PAM sequence: CTT
cctgggttcctcagtggggc

SEQ ID NO: 11369 - DNA, 20 bp, Artificial Sequence
  Description of Artificial Sequence: Synthetic oligonucleotide
  Target: APOC3; (-) strand; PAM type: YTN; PAM sequence: TTC
accttcctgggttcctcagt

SEQ ID NO: 11370 - DNA, 20 bp, Artificial Sequence
  Description of Artificial Sequence: Synthetic oligonucleotide
  Target: APOC3; (-) strand; PAM type: YTN; PAM sequence: CTC
gttcaccttcctgggttcct

SEQ ID NO: 11371 - DNA, 20 bp, Artificial Sequence
  Description of Artificial Sequence: Synthetic oligonucleotide
  Target: APOC3; (-) strand; PAM type: YTN; PAM sequence: CTC
tcgttcaccttcctgggttc

SEQ ID NO: 11372 - DNA, 20 bp, Artificial Sequence
  Description of Artificial Sequence: Synthetic oligonucleotide
  Target: APOC3; (-) strand; PAM type: YTN; PAM sequence: TTC
tctcgttcaccttcctgggt

SEQ ID NO: 11373 - DNA, 20 bp, Artificial Sequence
  Description of Artificial Sequence: Synthetic oligonucleotide
  Target: APOC3; (-) strand; PAM type: YTN; PAM sequence: CTG
attctctcgttcaccttcct

SEQ ID NO: 11374 - DNA, 20 bp, Artificial Sequence
  Description of Artificial Sequence: Synthetic oligonucleotide
  Target: APOC3; (-) strand; PAM type: YTN; PAM sequence: CTC
cccagcccccaccaggactg

SEQ ID NO: 11375 - DNA, 20 bp, Artificial Sequence
  Description of Artificial Sequence: Synthetic oligonucleotide
  Target: APOC3; (-) strand; PAM type: YTN; PAM sequence: CTG
gggccctccccagcccccac

SEQ ID NO: 11376 - DNA, 20 bp, Artificial Sequence
  Description of Artificial Sequence: Synthetic oligonucleotide
  Target: APOC3; (-) strand; PAM type: YTN; PAM sequence: CTC
atgtctggggccctccccag

SEQ ID NO: 11377 - DNA, 20 bp, Artificial Sequence
  Description of Artificial Sequence: Synthetic oligonucleotide
  Target: APOC3; (-) strand; PAM type: YTN; PAM sequence: CTG
gtctcatgtctggggccctc

SEQ ID NO: 11378 - DNA, 20 bp, Artificial Sequence
  Description of Artificial Sequence: Synthetic oligonucleotide
  Target: APOC3; (-) strand; PAM type: YTN; PAM sequence: CTG
ggggaggagctggtctcatg

SEQ ID NO: 11379 - DNA, 20 bp, Artificial Sequence
  Description of Artificial Sequence: Synthetic oligonucleotide
  Target: APOC3; (-) strand; PAM type: YTN; PAM sequence: CTG
ataacatcccctgggggagg

SEQ ID NO: 11380 - DNA, 20 bp, Artificial Sequence
  Description of Artificial Sequence: Synthetic oligonucleotide
  Target: APOC3; (-) strand; PAM type: YTN; PAM sequence: CTG
gacccactgataacatcccc

SEQ ID NO: 11381 - DNA, 20 bp, Artificial Sequence
  Description of Artificial Sequence: Synthetic oligonucleotide
  Target: APOC3; (-) strand; PAM type: YTN; PAM sequence: CTC
tggacccactgataacatcc

SEQ ID NO: 11382 - DNA, 20 bp, Artificial Sequence
  Description of Artificial Sequence: Synthetic oligonucleotide
  Target: APOC3; (-) strand; PAM type: YTN; PAM sequence: TTG
ccctctggacccactgataa

SEQ ID NO: 11383 - DNA, 20 bp, Artificial Sequence
  Description of Artificial Sequence: Synthetic oligonucleotide
  Target: APOC3; (-) strand; PAM type: YTN; PAM sequence: TTT
gccctctggacccactgata

SEQ ID NO: 11384 - DNA, 20 bp, Artificial Sequence
  Description of Artificial Sequence: Synthetic oligonucleotide
  Target: APOC3; (-) strand; PAM type: YTN; PAM sequence: TTT
tgccctctggacccactgat

SEQ ID NO: 11385 - DNA, 20 bp, Artificial Sequence
  Description of Artificial Sequence: Synthetic oligonucleotide
  Target: APOC3; (-) strand; PAM type: YTN; PAM sequence: CTA
ttttgccctctggacccact

SEQ ID NO: 11386 - DNA, 20 bp, Artificial Sequence
  Description of Artificial Sequence: Synthetic oligonucleotide
  Target: APOC3; (-) strand; PAM type: YTN; PAM sequence: CTC
cctattttgccctctggacc

SEQ ID NO: 11387 - DNA, 20 bp, Artificial Sequence
  Description of Artificial Sequence: Synthetic oligonucleotide
  Target: APOC3; (-) strand; PAM type: YTN; PAM sequence: CTC
caccaggctccctattttgc

SEQ ID NO: 11388 - DNA, 20 bp, Artificial Sequence
  Description of Artificial Sequence: Synthetic oligonucleotide
  Target: APOC3; (-) strand; PAM type: YTN; PAM sequence: CTC
cctccaccaggctccctatt

SEQ ID NO: 11389 - DNA, 20 bp, Artificial Sequence
  Description of Artificial Sequence: Synthetic oligonucleotide
  Target: APOC3; (-) strand; PAM type: YTN; PAM sequence: TTG
cccctccctccaccaggctc

SEQ ID NO: 11390 - DNA, 20 bp, Artificial Sequence
  Description of Artificial Sequence: Synthetic oligonucleotide
  Target: APOC3; (-) strand; PAM type: YTN; PAM sequence: TTT
gcccctccctccaccaggct

SEQ ID NO: 11391 - DNA, 20 bp, Artificial Sequence
  Description of Artificial Sequence: Synthetic oligonucleotide
  Target: APOC3; (-) strand; PAM type: YTN; PAM sequence: CTT
tgcccctccctccaccaggc

SEQ ID NO: 11392 - DNA, 20 bp, Artificial Sequence
  Description of Artificial Sequence: Synthetic oligonucleotide
  Target: APOC3; (-) strand; PAM type: YTN; PAM sequence: CTC
agagcccgaggcctttgccc

SEQ ID NO: 11393 - DNA, 20 bp, Artificial Sequence
  Description of Artificial Sequence: Synthetic oligonucleotide
  Target: APOC3; (-) strand; PAM type: YTN; PAM sequence: TTG
gtggagaagggccaaggccg

SEQ ID NO: 11394 - DNA, 20 bp, Artificial Sequence
  Description of Artificial Sequence: Synthetic oligonucleotide
  Target: APOC3; (-) strand; PAM type: YTN; PAM sequence: TTA
gtgtagggcaggggttggtg

SEQ ID NO: 11395 - DNA, 20 bp, Artificial Sequence
  Description of Artificial Sequence: Synthetic oligonucleotide
  Target: APOC3; (-) strand; PAM type: YTN; PAM sequence: CTT
agtgtagggcaggggttggt

SEQ ID NO: 11396 - DNA, 20 bp, Artificial Sequence
  Description of Artificial Sequence: Synthetic oligonucleotide
  Target: APOC3; (-) strand; PAM type: YTN; PAM sequence: CTC
ccccttagtgtagggcaggg

SEQ ID NO: 11397 - DNA, 20 bp, Artificial Sequence
  Description of Artificial Sequence: Synthetic oligonucleotide
  Target: APOC3; (-) strand; PAM type: YTN; PAM sequence: CTG
cctcccccttagtgtagggc

SEQ ID NO: 11398 - DNA, 20 bp, Artificial Sequence
  Description of Artificial Sequence: Synthetic oligonucleotide
  Target: APOC3; (-) strand; PAM type: YTN; PAM sequence: CTG
tgtgccccccgctgcctccc

SEQ ID NO: 11399 - DNA, 20 bp, Artificial Sequence
  Description of Artificial Sequence: Synthetic oligonucleotide
  Target: APOC3; (-) strand; PAM type: YTN; PAM sequence: CTC
acccagcagccccccacccg

SEQ ID NO: 11400 - DNA, 20 bp, Artificial Sequence
  Description of Artificial Sequence: Synthetic oligonucleotide
  Target: APOC3; (-) strand; PAM type: YTN; PAM sequence: CTG
ctcacccagcagccccccac

SEQ ID NO: 11401 - DNA, 20 bp, Artificial Sequence
  Description of Artificial Sequence: Synthetic oligonucleotide
  Target: APOC3; (-) strand; PAM type: YTN; PAM sequence: TTC
aatccaggcaggcgagtgct

SEQ ID NO: 11402 - DNA, 20 bp, Artificial Sequence
  Description of Artificial Sequence: Synthetic oligonucleotide
  Target: APOC3; (-) strand; PAM type: YTN; PAM sequence: TTT
caatccaggcaggcgagtgc

SEQ ID NO: 11403 - DNA, 20 bp, Artificial Sequence
  Description of Artificial Sequence: Synthetic oligonucleotide
  Target: APOC3; (-) strand; PAM type: YTN; PAM sequence: CTG
ggtttcaatccaggcaggcg

SEQ ID NO: 11404 - DNA, 20 bp, Artificial Sequence
  Description of Artificial Sequence: Synthetic oligonucleotide
  Target: APOC3; (-) strand; PAM type: YTN; PAM sequence: CTC
tgggtttcaatccaggcagg

SEQ ID NO: 11405 - DNA, 20 bp, Artificial Sequence
  Description of Artificial Sequence: Synthetic oligonucleotide
  Target: APOC3; (-) strand; PAM type: YTN; PAM sequence: CTC
catctctgggtttcaatcca

SEQ ID NO: 11406 - DNA, 20 bp, Artificial Sequence
  Description of Artificial Sequence: Synthetic oligonucleotide
  Target: APOC3; (-) strand; PAM type: YTN; PAM sequence: CTC
ccagcacctccatctctggg

SEQ ID NO: 11407 - DNA, 20 bp, Artificial Sequence
  Description of Artificial Sequence: Synthetic oligonucleotide
  Target: APOC3; (-) strand; PAM type: YTN; PAM sequence: CTC
acagcccctcccagcacctc

SEQ ID NO: 11408 - DNA, 20 bp, Artificial Sequence
  Description of Artificial Sequence: Synthetic oligonucleotide
  Target: APOC3; (-) strand; PAM type: YTN; PAM sequence: CTC
tcacagcccctcccagcacc

SEQ ID NO: 11409 - DNA, 20 bp, Artificial Sequence
  Description of Artificial Sequence: Synthetic oligonucleotide
  Target: APOC3; (-) strand; PAM type: YTN; PAM sequence: CTG
agctctcacagcccctccca

SEQ ID NO: 11410 - DNA, 20 bp, Artificial Sequence
  Description of Artificial Sequence: Synthetic oligonucleotide
  Target: APOC3; (-) strand; PAM type: YTN; PAM sequence: TTA
cagggctgagctctcacagc

SEQ ID NO: 11411 - DNA, 20 bp, Artificial Sequence
  Description of Artificial Sequence: Synthetic oligonucleotide
  Target: APOC3; (-) strand; PAM type: YTN; PAM sequence: CTG
gttacagggctgagctctca

SEQ ID NO: 11412 - DNA, 20 bp, Artificial Sequence
  Description of Artificial Sequence: Synthetic oligonucleotide
  Target: APOC3; (-) strand; PAM type: YTN; PAM sequence: CTC
cggcaaggcctggttacagg

SEQ ID NO: 11413 - DNA, 20 bp, Artificial Sequence
  Description of Artificial Sequence: Synthetic oligonucleotide
  Target: APOC3; (-) strand; PAM type: YTN; PAM sequence: TTG
gagtaaaggcacagaagacc

SEQ ID NO: 11414 - DNA, 20 bp, Artificial Sequence
  Description of Artificial Sequence: Synthetic oligonucleotide
  Target: APOC3; (-) strand; PAM type: YTN; PAM sequence: TTT
ggagtaaaggcacagaagac

SEQ ID NO: 11415 - DNA, 20 bp, Artificial Sequence
  Description of Artificial Sequence: Synthetic oligonucleotide
  Target: APOC3; (-) strand; PAM type: YTN; PAM sequence: CTG
gggggtgtttggagtaaagg

SEQ ID NO: 11416 - DNA, 20 bp, Artificial Sequence
  Description of Artificial Sequence: Synthetic oligonucleotide
  Target: APOC3; (-) strand; PAM type: YTN; PAM sequence: TTG
ggctggggggtgtttggagt

SEQ ID NO: 11417 - DNA, 20 bp, Artificial Sequence
  Description of Artificial Sequence: Synthetic oligonucleotide
  Target: APOC3; (-) strand; PAM type: YTN; PAM sequence: CTT
gggctggggggtgtttggag

SEQ ID NO: 11418 - DNA, 20 bp, Artificial Sequence
  Description of Artificial Sequence: Synthetic oligonucleotide
  Target: APOC3; (-) strand; PAM type: YTN; PAM sequence: TTG
agaacaagtgggtggcttgg

SEQ ID NO: 11419 - DNA, 20 bp, Artificial Sequence
  Description of Artificial Sequence: Synthetic oligonucleotide
  Target: APOC3; (-) strand; PAM type: YTN; PAM sequence: CTT
gagaacaagtgggtggcttg

SEQ ID NO: 11420 - DNA, 20 bp, Artificial Sequence
  Description of Artificial Sequence: Synthetic oligonucleotide
  Target: APOC3; (-) strand; PAM type: YTN; PAM sequence: TTC
agacttgagaacaagtgggt

SEQ ID NO: 11421 - DNA, 20 bp, Artificial Sequence
  Description of Artificial Sequence: Synthetic oligonucleotide
  Target: APOC3; (-) strand; PAM type: YTN; PAM sequence: CTT
cagacttgagaacaagtggg

SEQ ID NO: 11422 - DNA, 20 bp, Artificial Sequence
  Description of Artificial Sequence: Synthetic oligonucleotide
  Target: APOC3; (-) strand; PAM type: YTN; PAM sequence: TTC
ttcagacttgagaacaagtg

SEQ ID NO: 11423 - DNA, 20 bp, Artificial Sequence
  Description of Artificial Sequence: Synthetic oligonucleotide
  Target: APOC3; (-) strand; PAM type: YTN; PAM sequence: CTT
cttcagacttgagaacaagt

SEQ ID NO: 11424 - DNA, 20 bp, Artificial Sequence
  Description of Artificial Sequence: Synthetic oligonucleotide
  Target: APOC3; (-) strand; PAM type: YTN; PAM sequence: CTG
gagtagaggggtgaggggct

SEQ ID NO: 11425 - DNA, 20 bp, Artificial Sequence
  Description of Artificial Sequence: Synthetic oligonucleotide
  Target: APOC3; (-) strand; PAM type: YTN; PAM sequence: CTG
aacacagcctggagtagagg

SEQ ID NO: 11426 - DNA, 20 bp, Artificial Sequence
  Description of Artificial Sequence: Synthetic oligonucleotide
  Target: APOC3; (-) strand; PAM type: YTN; PAM sequence: CTC
caccagccccaagccctgaa

SEQ ID NO: 11427 - DNA, 20 bp, Artificial Sequence
  Description of Artificial Sequence: Synthetic oligonucleotide
  Target: APOC3; (-) strand; PAM type: YTN; PAM sequence: CTC
cctccaccagccccaagccc

SEQ ID NO: 11428 - DNA, 20 bp, Artificial Sequence
  Description of Artificial Sequence: Synthetic oligonucleotide
  Target: APOC3; (-) strand; PAM type: YTN; PAM sequence: TTC
aggcccctccctccaccagc

SEQ ID NO: 11429 - DNA, 20 bp, Artificial Sequence
  Description of Artificial Sequence: Synthetic oligonucleotide
  Target: APOC3; (-) strand; PAM type: YTN; PAM sequence: TTT
caggcccctccctccaccag

SEQ ID NO: 11430 - DNA, 20 bp, Artificial Sequence
  Description of Artificial Sequence: Synthetic oligonucleotide
  Target: APOC3; (-) strand; PAM type: YTN; PAM sequence: CTG
gaatttcaggcccctccctc

SEQ ID NO: 11431 - DNA, 20 bp, Artificial Sequence
  Description of Artificial Sequence: Synthetic oligonucleotide
  Target: APOC3; (-) strand; PAM type: YTN; PAM sequence: TTC
acactggaatttcaggcccc

SEQ ID NO: 11432 - DNA, 20 bp, Artificial Sequence
  Description of Artificial Sequence: Synthetic oligonucleotide
  Target: APOC3; (-) strand; PAM type: YTN; PAM sequence: TTT
cacactggaatttcaggccc

SEQ ID NO: 11433 - DNA, 20 bp, Artificial Sequence
  Description of Artificial Sequence: Synthetic oligonucleotide
  Target: APOC3; (-) strand; PAM type: YTN; PAM sequence: CTT
tcacactggaatttcaggcc

SEQ ID NO: 11434 - DNA, 20 bp, Artificial Sequence
  Description of Artificial Sequence: Synthetic oligonucleotide
  Target: APOC3; (-) strand; PAM type: YTN; PAM sequence: CTC
agcctttcacactggaattt

SEQ ID NO: 11435 - DNA, 20 bp, Artificial Sequence
  Description of Artificial Sequence: Synthetic oligonucleotide
  Target: APOC3; (-) strand; PAM type: YTN; PAM sequence: CTC
gggcccatctcagcctttca

SEQ ID NO: 11436 - DNA, 20 bp, Artificial Sequence
  Description of Artificial Sequence: Synthetic oligonucleotide
  Target: APOC3; (-) strand; PAM type: YTN; PAM sequence: TTG
gacataggccaggggcctcg

SEQ ID NO: 11437 - DNA, 20 bp, Artificial Sequence
  Description of Artificial Sequence: Synthetic oligonucleotide
  Target: APOC3; (-) strand; PAM type: YTN; PAM sequence: CTT
ggacataggccaggggcctc

SEQ ID NO: 11438 - DNA, 20 bp, Artificial Sequence
  Description of Artificial Sequence: Synthetic oligonucleotide
  Target: APOC3; (-) strand; PAM type: YTN; PAM sequence: CTG
gtgagaggggaaatggcttg

SEQ ID NO: 11439 - DNA, 20 bp, Artificial Sequence
  Description of Artificial Sequence: Synthetic oligonucleotide
  Target: APOC3; (-) strand; PAM type: YTN; PAM sequence: CTC
cccagggagaggctggtgag

SEQ ID NO: 11440 - DNA, 20 bp, Artificial Sequence
  Description of Artificial Sequence: Synthetic oligonucleotide
  Target: APOC3; (-) strand; PAM type: YTN; PAM sequence: CTG
gctccccagggagaggctgg

SEQ ID NO: 11441 - DNA, 20 bp, Artificial Sequence
  Description of Artificial Sequence: Synthetic oligonucleotide
  Target: APOC3; (-) strand; PAM type: YTN; PAM sequence: CTG
actggctccccagggagagg

SEQ ID NO: 11442 - DNA, 20 bp, Artificial Sequence
  Description of Artificial Sequence: Synthetic oligonucleotide
  Target: APOC3; (-) strand; PAM type: YTN; PAM sequence: CTA
gctgactggctccccaggga

SEQ ID NO: 11443 - DNA, 20 bp, Artificial Sequence
  Description of Artificial Sequence: Synthetic oligonucleotide
  Target: APOC3; (-) strand; PAM type: YTN; PAM sequence: TTC
ctagctgactggctccccag

SEQ ID NO: 11444 - DNA, 20 bp, Artificial Sequence
  Description of Artificial Sequence: Synthetic oligonucleotide
  Target: APOC3; (-) strand; PAM type: YTN; PAM sequence: CTT
cctagctgactggctcccca

SEQ ID NO: 11445 - DNA, 20 bp, Artificial Sequence
  Description of Artificial Sequence: Synthetic oligonucleotide
  Target: APOC3; (-) strand; PAM type: YTN; PAM sequence: TTC
cttcctagctgactggctcc

SEQ ID NO: 11446 - DNA, 20 bp, Artificial Sequence
  Description of Artificial Sequence: Synthetic oligonucleotide
  Target: APOC3; (-) strand; PAM type: YTN; PAM sequence: CTC
attccttcctagctgactgg

SEQ ID NO: 11447 - DNA, 20 bp, Artificial Sequence
  Description of Artificial Sequence: Synthetic oligonucleotide
  Target: APOC3; (-) strand; PAM type: YTN; PAM sequence: CTG
gggagccctcattccttcct

SEQ ID NO: 11448 - DNA, 20 bp, Artificial Sequence
  Description of Artificial Sequence: Synthetic oligonucleotide
  Target: APOC3; (-) strand; PAM type: YTN; PAM sequence: CTG
ggggtgggcctggggagccc

SEQ ID NO: 11449 - DNA, 20 bp, Artificial Sequence
  Description of Artificial Sequence: Synthetic oligonucleotide
  Target: APOC3; (-) strand; PAM type: YTN; PAM sequence: CTC
aggaactgggggtgggcctg

SEQ ID NO: 11450 - DNA, 20 bp, Artificial Sequence
  Description of Artificial Sequence: Synthetic oligonucleotide
  Target: APOC3; (-) strand; PAM type: YTN; PAM sequence: CTG
cagcccagatgagctcagga

SEQ ID NO: 11451 - DNA, 20 bp, Artificial Sequence
  Description of Artificial Sequence: Synthetic oligonucleotide
  Target: APOC3; (-) strand; PAM type: YTN; PAM sequence: CTG
tcccgccagccctgcagccc

SEQ ID NO: 11452 - DNA, 20 bp, Artificial Sequence
  Description of Artificial Sequence: Synthetic oligonucleotide
  Target: APOC3; (-) strand; PAM type: YTN; PAM sequence: CTG
ctgtcccgccagccctgcag

SEQ ID NO: 11453 - DNA, 20 bp, Artificial Sequence
  Description of Artificial Sequence: Synthetic oligonucleotide
  Target: APOC3; (-) strand; PAM type: YTN; PAM sequence: CTG
agtccacgctgctgtcccgc

SEQ ID NO: 11454 - DNA, 20 bp, Artificial Sequence
  Description of Artificial Sequence: Synthetic oligonucleotide
  Target: APOC3; (-) strand; PAM type: YTN; PAM sequence: CTA
ggagactgagtccacgctgc

SEQ ID NO: 11455 - DNA, 20 bp, Artificial Sequence
  Description of Artificial Sequence: Synthetic oligonucleotide
  Target: APOC3; (-) strand; PAM type: YTN; PAM sequence: TTG
ggaaatccctaggagactga

SEQ ID NO: 11456 - DNA, 20 bp, Artificial Sequence
  Description of Artificial Sequence: Synthetic oligonucleotide
  Target: APOC3; (-) strand; PAM type: YTN; PAM sequence: CTG
aggcagggtgtccagatgca

SEQ ID NO: 11457 - DNA, 20 bp, Artificial Sequence
  Description of Artificial Sequence: Synthetic oligonucleotide
  Target: APOC3; (-) strand; PAM type: YTN; PAM sequence: CTG
accagtggagatgagggcct

SEQ ID NO: 11458 - DNA, 20 bp, Artificial Sequence
  Description of Artificial Sequence: Synthetic oligonucleotide
  Target: APOC3; (-) strand; PAM type: YTN; PAM sequence: CTG
ctgaccagtggagatgaggg

SEQ ID NO: 11459 - DNA, 20 bp, Artificial Sequence
  Description of Artificial Sequence: Synthetic oligonucleotide
  Target: APOC3; (-) strand; PAM type: YTN; PAM sequence: CTG
ggcaaaggtcacctgctgac

SEQ ID NO: 11460 - DNA, 20 bp, Artificial Sequence
  Description of Artificial Sequence: Synthetic oligonucleotide
  Target: APOC3; (-) strand; PAM type: YTN; PAM sequence: CTG
aggacccagggcgctgggca

SEQ ID NO: 11461 - DNA, 20 bp, Artificial Sequence
  Description of Artificial Sequence: Synthetic oligonucleotide
  Target: APOC3; (-) strand; PAM type: YTN; PAM sequence: CTC
cagggcagcaggcactgagg

SEQ ID NO: 11462 - DNA, 20 bp, Artificial Sequence
  Description of Artificial Sequence: Synthetic oligonucleotide
  Target: APOC3; (-) strand; PAM type: YTN; PAM sequence: TTA
tatcatctccagggcagcag

SEQ ID NO: 11463 - DNA, 20 bp, Artificial Sequence
  Description of Artificial Sequence: Synthetic oligonucleotide
  Target: APOC3; (-) strand; PAM type: YTN; PAM sequence: TTT
atatcatctccagggcagca

SEQ ID NO: 11464 - DNA, 20 bp, Artificial Sequence
  Description of Artificial Sequence: Synthetic oligonucleotide
  Target: APOC3; (-) strand; PAM type: YTN; PAM sequence: TTT
tatatcatctccagggcagc

SEQ ID NO: 11465 - DNA, 20 bp, Artificial Sequence
  Description of Artificial Sequence: Synthetic oligonucleotide
  Target: APOC3; (-) strand; PAM type: YTN; PAM sequence: CTG
ttttatatcatctccagggc

SEQ ID NO: 11466 - DNA, 20 bp, Artificial Sequence
  Description of Artificial Sequence: Synthetic oligonucleotide
  Target: APOC3; (-) strand; PAM type: YTN; PAM sequence: CTG
acctgttttatatcatctcc

SEQ ID NO: 11467 - DNA, 20 bp, Artificial Sequence
  Description of Artificial Sequence: Synthetic oligonucleotide
  Target: APOC3; (-) strand; PAM type: YTN; PAM sequence: TTC
tgacctgttttatatcatct

SEQ ID NO: 11468 - DNA, 20 bp, Artificial Sequence
  Description of Artificial Sequence: Synthetic oligonucleotide
  Target: APOC3; (-) strand; PAM type: YTN; PAM sequence: CTG
agcagacaggcaggagggtt

SEQ ID NO: 11469 - DNA, 20 bp, Artificial Sequence
  Description of Artificial Sequence: Synthetic oligonucleotide
  Target: APOC3; (-) strand; PAM type: YTN; PAM sequence: CTA
gggatgaactgagcagacag

SEQ ID NO: 11470 - DNA, 20 bp, Artificial Sequence
  Description of Artificial Sequence: Synthetic oligonucleotide
  Target: APOC3; (-) strand; PAM type: YTN; PAM sequence: CTC
tagggatgaactgagcagac

SEQ ID NO: 11471 - DNA, 20 bp, Artificial Sequence
  Description of Artificial Sequence: Synthetic oligonucleotide
  Target: APOC3; (-) strand; PAM type: YTN; PAM sequence: CTG
cctctagggatgaactgagc

SEQ ID NO: 11472 - DNA, 20 bp, Artificial Sequence
  Description of Artificial Sequence: Synthetic oligonucleotide
  Target: APOC3; (-) strand; PAM type: YTN; PAM sequence: CTG
gagcagctgcctctagggat

SEQ ID NO: 11473 - DNA, 20 bp, Artificial Sequence
  Description of Artificial Sequence: Synthetic oligonucleotide
  Target: APOC3; (-) strand; PAM type: YTN; PAM sequence: TTA
cctggagcagctgcctctag

SEQ ID NO: 11474 - DNA, 20 bp, Artificial Sequence
  Description of Artificial Sequence: Synthetic oligonucleotide
  Target: APOC3; (-) strand; PAM type: YTN; PAM sequence: CTC
cccagagggcattacctgga

SEQ ID NO: 11475 - DNA, 20 bp, Artificial Sequence
  Description of Artificial Sequence: Synthetic oligonucleotide
  Target: APOC3; (-) strand; PAM type: YTN; PAM sequence: TTC
ccctccccagagggcattac

SEQ ID NO: 11476 - DNA, 20 bp, Artificial Sequence
  Description of Artificial Sequence: Synthetic oligonucleotide
  Target: APOC3; (-) strand; PAM type: YTN; PAM sequence: TTT
cccctccccagagggcatta

SEQ ID NO: 11477 - DNA, 20 bp, Artificial Sequence
  Description of Artificial Sequence: Synthetic oligonucleotide
  Target: APOC3; (-) strand; PAM type: YTN; PAM sequence: CTT
tcccctccccagagggcatt

SEQ ID NO: 11478 - DNA, 20 bp, Artificial Sequence
  Description of Artificial Sequence: Synthetic oligonucleotide
  Target: APOC3; (-) strand; PAM type: YTN; PAM sequence: CTC
tttcccctccccagagggca

SEQ ID NO: 11479 - DNA, 20 bp, Artificial Sequence
  Description of Artificial Sequence: Synthetic oligonucleotide
  Target: APOC3; (-) strand; PAM type: YTN; PAM sequence: CTC
ctctttcccctccccagagg

SEQ ID NO: 11480 - DNA, 20 bp, Artificial Sequence
  Description of Artificial Sequence: Synthetic oligonucleotide
  Target: APOC3; (-) strand; PAM type: YTN; PAM sequence: CTC
ccctcctctttcccctcccc

SEQ ID NO: 11481 - DNA, 20 bp, Artificial Sequence
  Description of Artificial Sequence: Synthetic oligonucleotide
  Target: APOC3; (-) strand; PAM type: YTN; PAM sequence: CTC
ctcccctcctctttcccctc

SEQ ID NO: 11482 - DNA, 20 bp, Artificial Sequence
  Description of Artificial Sequence: Synthetic oligonucleotide
  Target: APOC3; (-) strand; PAM type: YTN; PAM sequence: TTC
atcctcctcccctcctcttt

SEQ ID NO: 11483 - DNA, 20 bp, Artificial Sequence
  Description of Artificial Sequence: Synthetic oligonucleotide
  Target: APOC3; (-) strand; PAM type: YTN; PAM sequence: CTT
catcctcctcccctcctctt

SEQ ID NO: 11484 - DNA, 20 bp, Artificial Sequence
  Description of Artificial Sequence: Synthetic oligonucleotide
  Target: APOC3; (-) strand; PAM type: YTN; PAM sequence: CTC
ttcatcctcctcccctcctc

SEQ ID NO: 11485 - DNA, 20 bp, Artificial Sequence
  Description of Artificial Sequence: Synthetic oligonucleotide
  Target: APOC3; (-) strand; PAM type: YTN; PAM sequence: TTG
cccctcttcatcctcctccc

SEQ ID NO: 11486 - DNA, 20 bp, Artificial Sequence
  Description of Artificial Sequence: Synthetic oligonucleotide
  Target: APOC3; (-) strand; PAM type: YTN; PAM sequence: CTT
gcccctcttcatcctcctcc

SEQ ID NO: 11487 - DNA, 20 bp, Artificial Sequence
  Description of Artificial Sequence: Synthetic oligonucleotide
  Target: APOC3; (-) strand; PAM type: YTN; PAM sequence: CTC
ttgcccctcttcatcctcct

SEQ ID NO: 11488 - DNA, 20 bp, Artificial Sequence
  Description of Artificial Sequence: Synthetic oligonucleotide
  Target: APOC3; (-) strand; PAM type: YTN; PAM sequence: CTC
ctcttgcccctcttcatcct

SEQ ID NO: 11489 - DNA, 20 bp, Artificial Sequence
  Description of Artificial Sequence: Synthetic oligonucleotide
  Target: APOC3; (-) strand; PAM type: YTN; PAM sequence: CTG
ggcagggagctcctcttgcc

SEQ ID NO: 11490 - DNA, 20 bp, Artificial Sequence
  Description of Artificial Sequence: Synthetic oligonucleotide
  Target: APOC3; (-) strand; PAM type: YTN; PAM sequence: CTG
ggctgggcagggagctcctc

SEQ ID NO: 11491 - DNA, 20 bp, Artificial Sequence
  Description of Artificial Sequence: Synthetic oligonucleotide
  Target: APOC3; (-) strand; PAM type: YTN; PAM sequence: CTG
gctgggctgggcagggagct

SEQ ID NO: 11492 - DNA, 20 bp, Artificial Sequence
  Description of Artificial Sequence: Synthetic oligonucleotide
  Target: APOC3; (-) strand; PAM type: YTN; PAM sequence: TTG
ctggctgggctgggcaggga

SEQ ID NO: 11493 - DNA, 20 bp, Artificial Sequence
  Description of Artificial Sequence: Synthetic oligonucleotide
  Target: APOC3; (-) strand; PAM type: YTN; PAM sequence: CTT
gctggctgggctgggcaggg

SEQ ID NO: 11494 - DNA, 20 bp, Artificial Sequence
  Description of Artificial Sequence: Synthetic oligonucleotide
  Target: APOC3; (-) strand; PAM type: YTN; PAM sequence: CTC
caggcttgctggctgggctg

SEQ ID NO: 11495 - DNA, 20 bp, Artificial Sequence
  Description of Artificial Sequence: Synthetic oligonucleotide
  Target: APOC3; (-) strand; PAM type: YTN; PAM sequence: TTC
tccaggcttgctggctgggc

SEQ ID NO: 11496 - DNA, 20 bp, Artificial Sequence
  Description of Artificial Sequence: Synthetic oligonucleotide
  Target: APOC3; (-) strand; PAM type: YTN; PAM sequence: CTT
ctccaggcttgctggctggg

SEQ ID NO: 11497 - DNA, 20 bp, Artificial Sequence
  Description of Artificial Sequence: Synthetic oligonucleotide
  Target: APOC3; (-) strand; PAM type: YTN; PAM sequence: CTA
gcaagtgcttctccaggctt

SEQ ID NO: 11498 - DNA, 20 bp, Artificial Sequence
  Description of Artificial Sequence: Synthetic oligonucleotide
  Target: APOC3; (-) strand; PAM type: YTN; PAM sequence: CTC
tagcaagtgcttctccaggc

SEQ ID NO: 11499 - DNA, 20 bp, Artificial Sequence
  Description of Artificial Sequence: Synthetic oligonucleotide
  Target: APOC3; (-) strand; PAM type: YTN; PAM sequence: TTA
gctctagcaagtgcttctcc

SEQ ID NO: 11500 - DNA, 20 bp, Artificial Sequence
  Description of Artificial Sequence: Synthetic oligonucleotide
  Target: APOC3; (-) strand; PAM type: YTN; PAM sequence: CTT
agctctagcaagtgcttctc

SEQ ID NO: 11501 - DNA, 20 bp, Artificial Sequence
  Description of Artificial Sequence: Synthetic oligonucleotide
  Target: APOC3; (-) strand; PAM type: YTN; PAM sequence: TTC
cttagctctagcaagtgctt

SEQ ID NO: 11502 - DNA, 20 bp, Artificial Sequence
  Description of Artificial Sequence: Synthetic oligonucleotide
  Target: APOC3; (-) strand; PAM type: YTN; PAM sequence: CTT
ccttagctctagcaagtgct

SEQ ID NO: 11503 - DNA, 20 bp, Artificial Sequence
  Description of Artificial Sequence: Synthetic oligonucleotide
  Target: APOC3; (-) strand; PAM type: YTN; PAM sequence: CTC
cgaggcttccttagctctag

SEQ ID NO: 11504 - DNA, 20 bp, Artificial Sequence
  Description of Artificial Sequence: Synthetic oligonucleotide
  Target: APOC3; (-) strand; PAM type: YTN; PAM sequence: TTA
tgatgaggggtggggggcac

SEQ ID NO: 11505 - DNA, 20 bp, Artificial Sequence
  Description of Artificial Sequence: Synthetic oligonucleotide
  Target: APOC3; (-) strand; PAM type: YTN; PAM sequence: TTC
aggttatgatgaggggtggg

SEQ ID NO: 11506 - DNA, 20 bp, Artificial Sequence
  Description of Artificial Sequence: Synthetic oligonucleotide
  Target: APOC3; (-) strand; PAM type: YTN; PAM sequence: CTT
caggttatgatgaggggtgg

SEQ ID NO: 11507 - DNA, 20 bp, Artificial Sequence
  Description of Artificial Sequence: Synthetic oligonucleotide
  Target: APOC3; (-) strand; PAM type: YTN; PAM sequence: TTC
ttcaggttatgatgaggggt

SEQ ID NO: 11508 - DNA, 20 bp, Artificial Sequence
  Description of Artificial Sequence: Synthetic oligonucleotide
  Target: APOC3; (-) strand; PAM type: YTN; PAM sequence: CTC
catgttcttcaggttatgat

SEQ ID NO: 11509 - DNA, 20 bp, Artificial Sequence
  Description of Artificial Sequence: Synthetic oligonucleotide
  Target: APOC3; (-) strand; PAM type: YTN; PAM sequence: CTC
ccgggcctccatgttcttca

SEQ ID NO: 11510 - DNA, 20 bp, Artificial Sequence
  Description of Artificial Sequence: Synthetic oligonucleotide
  Target: APOC3; (-) strand; PAM type: YTN; PAM sequence: TTG
ggcaagtgacacccctcccg

SEQ ID NO: 11511 - DNA, 20 bp, Artificial Sequence
  Description of Artificial Sequence: Synthetic oligonucleotide
  Target: APOC3; (-) strand; PAM type: YTN; PAM sequence: TTT
gggcaagtgacacccctccc

SEQ ID NO: 11512 - DNA, 20 bp, Artificial Sequence
  Description of Artificial Sequence: Synthetic oligonucleotide
  Target: APOC3; (-) strand; PAM type: YTN; PAM sequence: CTT
tgggcaagtgacacccctcc

SEQ ID NO: 11513 - DNA, 20 bp, Artificial Sequence
  Description of Artificial Sequence: Synthetic oligonucleotide
  Target: APOC3; (-) strand; PAM type: YTN; PAM sequence: CTG
tgtagctttgggcaagtgac

SEQ ID NO: 11514 - DNA, 20 bp, Artificial Sequence
  Description of Artificial Sequence: Synthetic oligonucleotide
  Target: APOC3; (-) strand; PAM type: YTN; PAM sequence: TTC
cagccccaccccctgtgtag

SEQ ID NO: 11515 - DNA, 20 bp, Artificial Sequence
  Description of Artificial Sequence: Synthetic oligonucleotide
  Target: APOC3; (-) strand; PAM type: YTN; PAM sequence: CTT
ccagccccaccccctgtgta

SEQ ID NO: 11516 - DNA, 20 bp, Artificial Sequence
  Description of Artificial Sequence: Synthetic oligonucleotide
  Target: APOC3; (-) strand; PAM type: YTN; PAM sequence: TTG
gagccacttccagccccacc

SEQ ID NO: 11517 - DNA, 20 bp, Artificial Sequence
  Description of Artificial Sequence: Synthetic oligonucleotide
  Target: APOC3; (-) strand; PAM type: YTN; PAM sequence: CTT
ggagccacttccagccccac

SEQ ID NO: 11518 - DNA, 20 bp, Artificial Sequence
  Description of Artificial Sequence: Synthetic oligonucleotide
  Target: APOC3; (-) strand; PAM type: YTN; PAM sequence: CTG
cacttggagccacttccagc

SEQ ID NO: 11519 - DNA, 20 bp, Artificial Sequence
  Description of Artificial Sequence: Synthetic oligonucleotide
  Target: APOC3; (-) strand; PAM type: YTN; PAM sequence: CTG
aagaatgaggggggaacctg

SEQ ID NO: 11520 - DNA, 20 bp, Artificial Sequence
  Description of Artificial Sequence: Synthetic oligonucleotide
  Target: APOC3; (-) strand; PAM type: YTN; PAM sequence: CTA
agcctgaagaatgagggggg

SEQ ID NO: 11521 - DNA, 20 bp, Artificial Sequence
  Description of Artificial Sequence: Synthetic oligonucleotide
  Target: APOC3; (-) strand; PAM type: YTN; PAM sequence: CTC
cagccctaagcctgaagaat

SEQ ID NO: 11522 - DNA, 20 bp, Artificial Sequence
  Description of Artificial Sequence: Synthetic oligonucleotide
  Target: APOC3; (-) strand; PAM type: YTN; PAM sequence: TTC
ctccagccctaagcctgaag

SEQ ID NO: 11523 - DNA, 20 bp, Artificial Sequence
  Description of Artificial Sequence: Synthetic oligonucleotide
  Target: APOC3; (-) strand; PAM type: YTN; PAM sequence: CTT
cctccagccctaagcctgaa

SEQ ID NO: 11524 - DNA, 20 bp, Artificial Sequence
  Description of Artificial Sequence: Synthetic oligonucleotide
  Target: APOC3; (-) strand; PAM type: YTN; PAM sequence: CTA
aggcttcctccagccctaag

SEQ ID NO: 11525 - DNA, 20 bp, Artificial Sequence
  Description of Artificial Sequence: Synthetic oligonucleotide
  Target: APOC3; (-) strand; PAM type: YTN; PAM sequence: CTG
tctaaggcttcctccagccc

SEQ ID NO: 11526 - DNA, 20 bp, Artificial Sequence
  Description of Artificial Sequence: Synthetic oligonucleotide
  Target: APOC3; (-) strand; PAM type: YTN; PAM sequence: CTG
ggctgtctaaggcttcctcc

SEQ ID NO: 11527 - DNA, 20 bp, Artificial Sequence
  Description of Artificial Sequence: Synthetic oligonucleotide
  Target: APOC3; (-) strand; PAM type: YTN; PAM sequence: CTG
gggtaggactgggctgtcta

SEQ ID NO: 11528 - DNA, 20 bp, Artificial Sequence
  Description of Artificial Sequence: Synthetic oligonucleotide
  Target: APOC3; (-) strand; PAM type: YTN; PAM sequence: CTG
tctggggtaggactgggctg

SEQ ID NO: 11529 - DNA, 20 bp, Artificial Sequence
  Description of Artificial Sequence: Synthetic oligonucleotide
  Target: APOC3; (-) strand; PAM type: YTN; PAM sequence: TTC
cctgtctggggtaggactgg

SEQ ID NO: 11530 - DNA, 20 bp, Artificial Sequence
  Description of Artificial Sequence: Synthetic oligonucleotide
  Target: APOC3; (-) strand; PAM type: YTN; PAM sequence: TTT
ccctgtctggggtaggactg

SEQ ID NO: 11531 - DNA, 20 bp, Artificial Sequence
  Description of Artificial Sequence: Synthetic oligonucleotide
  Target: APOC3; (-) strand; PAM type: YTN; PAM sequence: CTC
agtttccctgtctggggtag

SEQ ID NO: 11532 - DNA, 20 bp, Artificial Sequence
  Description of Artificial Sequence: Synthetic oligonucleotide
  Target: APOC3; (-) strand; PAM type: YTN; PAM sequence: CTC
caggcctcagtttccctgtc

SEQ ID NO: 11533 - DNA, 20 bp, Artificial Sequence
  Description of Artificial Sequence: Synthetic oligonucleotide
  Target: APOC3; (-) strand; PAM type: YTN; PAM sequence: CTC
tccaggcctcagtttccctg

SEQ ID NO: 11534 - DNA, 20 bp, Artificial Sequence
  Description of Artificial Sequence: Synthetic oligonucleotide
  Target: APOC3; (-) strand; PAM type: YTN; PAM sequence: CTG
gccctctccaggcctcagtt

SEQ ID NO: 11535 - DNA, 20 bp, Artificial Sequence
  Description of Artificial Sequence: Synthetic oligonucleotide
  Target: APOC3; (-) strand; PAM type: YTN; PAM sequence: TTC
tggccctctccaggcctcag

SEQ ID NO: 11536 - DNA, 20 bp, Artificial Sequence
  Description of Artificial Sequence: Synthetic oligonucleotide
  Target: APOC3; (-) strand; PAM type: YTN; PAM sequence: TTT
ctggccctctccaggcctca

SEQ ID NO: 11537 - DNA, 20 bp, Artificial Sequence
  Description of Artificial Sequence: Synthetic oligonucleotide
  Target: APOC3; (-) strand; PAM type: YTN; PAM sequence: TTG
ggtgatttctggccctctcc

SEQ ID NO: 11538 - DNA, 20 bp, Artificial Sequence
  Description of Artificial Sequence: Synthetic oligonucleotide
  Target: APOC3; (-) strand; PAM type: YTN; PAM sequence: TTT
gggtgatttctggccctctc

SEQ ID NO: 11539 - DNA, 20 bp, Artificial Sequence
  Description of Artificial Sequence: Synthetic oligonucleotide
  Target: APOC3; (-) strand; PAM type: YTN; PAM sequence: CTT
tgggtgatttctggccctct

SEQ ID NO: 11540 - DNA, 20 bp, Artificial Sequence
  Description of Artificial Sequence: Synthetic oligonucleotide
  Target: APOC3; (-) strand; PAM type: YTN; PAM sequence: CTG
tgtgtctttgggtgatttct

SEQ ID NO: 11541 - DNA, 20 bp, Artificial Sequence
  Description of Artificial Sequence: Synthetic oligonucleotide
  Target: APOC3; (-) strand; PAM type: YTN; PAM sequence: CTC
cgtccagtccagccaacatg

SEQ ID NO: 11542 - DNA, 20 bp, Artificial Sequence
  Description of Artificial Sequence: Synthetic oligonucleotide
  Target: APOC3; (-) strand; PAM type: YTN; PAM sequence: CTG
atctccgtccagtccagcca

SEQ ID NO: 11543 - DNA, 20 bp, Artificial Sequence
  Description of Artificial Sequence: Synthetic oligonucleotide
  Target: APOC3; (-) strand; PAM type: YTN; PAM sequence: CTG
gactgatctccgtccagtcc

SEQ ID NO: 11544 - DNA, 20 bp, Artificial Sequence
  Description of Artificial Sequence: Synthetic oligonucleotide
  Target: APOC3; (-) strand; PAM type: YTN; PAM sequence: CTG
cggtctggactgatctccgt

SEQ ID NO: 11545 - DNA, 20 bp, Artificial Sequence
  Description of Artificial Sequence: Synthetic oligonucleotide
  Target: APOC3; (-) strand; PAM type: YTN; PAM sequence: CTG
aacatcaaggcacctgcggt

SEQ ID NO: 11546 - DNA, 20 bp, Artificial Sequence
  Description of Artificial Sequence: Synthetic oligonucleotide
  Target: APOC3; (-) strand; PAM type: YTN; PAM sequence: CTG
gtgaggggcgagggatcgag

SEQ ID NO: 11547 - DNA, 20 bp, Artificial Sequence
  Description of Artificial Sequence: Synthetic oligonucleotide
  Target: APOC3; (-) strand; PAM type: YTN; PAM sequence: CTC
agaagggggactggtgaggg

SEQ ID NO: 11548 - DNA, 20 bp, Artificial Sequence
  Description of Artificial Sequence: Synthetic oligonucleotide
  Target: APOC3; (-) strand; PAM type: YTN; PAM sequence: CTC
tcagaagggggactggtgag

SEQ ID NO: 11549 - DNA, 20 bp, Artificial Sequence
  Description of Artificial Sequence: Synthetic oligonucleotide
  Target: APOC3; (-) strand; PAM type: YTN; PAM sequence: CTA
atacgggctctcagaagggg

SEQ ID NO: 11550 - DNA, 20 bp, Artificial Sequence
  Description of Artificial Sequence: Synthetic oligonucleotide
  Target: APOC3; (-) strand; PAM type: YTN; PAM sequence: CTG
ctaatacgggctctcagaag

SEQ ID NO: 11551 - DNA, 20 bp, Artificial Sequence
  Description of Artificial Sequence: Synthetic oligonucleotide
  Target: APOC3; (-) strand; PAM type: YTN; PAM sequence: CTC
cctgctaatacgggctctca

SEQ ID NO: 11552 - DNA, 20 bp, Artificial Sequence
  Description of Artificial Sequence: Synthetic oligonucleotide
  Target: APOC3; (-) strand; PAM type: YTN; PAM sequence: CTG
ccagaaggagtaggggccgg

SEQ ID NO: 11553 - DNA, 20 bp, Artificial Sequence
  Description of Artificial Sequence: Synthetic oligonucleotide
  Target: APOC3; (-) strand; PAM type: YTN; PAM sequence: CTG
ggtctgccagaaggagtagg

SEQ ID NO: 11554 - DNA, 20 bp, Artificial Sequence
  Description of Artificial Sequence: Synthetic oligonucleotide
  Target: APOC3; (-) strand; PAM type: YTN; PAM sequence: TTA
gctgggtctgccagaaggag

SEQ ID NO: 11555 - DNA, 20 bp, Artificial Sequence
  Description of Artificial Sequence: Synthetic oligonucleotide
  Target: APOC3; (-) strand; PAM type: YTN; PAM sequence: CTT
agctgggtctgccagaagga

SEQ ID NO: 11556 - DNA, 20 bp, Artificial Sequence
  Description of Artificial Sequence: Synthetic oligonucleotide
  Target: APOC3; (-) strand; PAM type: YTN; PAM sequence: CTA
aggtagaaccttagctgggt

SEQ ID NO: 11557 - DNA, 20 bp, Artificial Sequence
  Description of Artificial Sequence: Synthetic oligonucleotide
  Target: APOC3; (-) strand; PAM type: YTN; PAM sequence: CTG
gggaggtggcgtggccccta

SEQ ID NO: 11558 - DNA, 20 bp, Artificial Sequence
  Description of Artificial Sequence: Synthetic oligonucleotide
  Target: APOC3; (-) strand; PAM type: YTN; PAM sequence: CTC
cctggggaggtggcgtggcc

SEQ ID NO: 11559 - DNA, 20 bp, Artificial Sequence
  Description of Artificial Sequence: Synthetic oligonucleotide
  Target: APOC3; (-) strand; PAM type: YTN; PAM sequence: CTG
gacccctccctggggaggtg

SEQ ID NO: 11560 - DNA, 20 bp, Artificial Sequence
  Description of Artificial Sequence: Synthetic oligonucleotide
  Target: APOC3; (-) strand; PAM type: YTN; PAM sequence: CTC
tggacccctccctggggagg

SEQ ID NO: 11561 - DNA, 20 bp, Artificial Sequence
  Description of Artificial Sequence: Synthetic oligonucleotide
  Target: APOC3; (-) strand; PAM type: YTN; PAM sequence: CTG
tgaggggcaccccaggtccc

SEQ ID NO: 11562 - DNA, 20 bp, Artificial Sequence
  Description of Artificial Sequence: Synthetic oligonucleotide
  Target: APOC3; (-) strand; PAM type: YTN; PAM sequence: CTG
caaggaagtgtcctgtgagg

SEQ ID NO: 11563 - DNA, 20 bp, Artificial Sequence
  Description of Artificial Sequence: Synthetic oligonucleotide
  Target: APOC3; (-) strand; PAM type: YTN; PAM sequence: TTC
ctgcaaggaagtgtcctgtg

SEQ ID NO: 11564 - DNA, 20 bp, Artificial Sequence
  Description of Artificial Sequence: Synthetic oligonucleotide
  Target: APOC3; (-) strand; PAM type: YTN; PAM sequence: CTG
ttcctgcaaggaagtgtcct

SEQ ID NO: 11565 - DNA, 20 bp, Artificial Sequence
  Description of Artificial Sequence: Synthetic oligonucleotide
  Target: APOC3; (-) strand; PAM type: YTN; PAM sequence: CTC
tgttcctgcaaggaagtgtc

SEQ ID NO: 11566 - DNA, 20 bp, Artificial Sequence
  Description of Artificial Sequence: Synthetic oligonucleotide
  Target: APOC3; (-) strand; PAM type: YTN; PAM sequence: CTG
catggcacctctgttcctgc

SEQ ID NO: 11567 - DNA, 20 bp, Artificial Sequence
  Description of Artificial Sequence: Synthetic oligonucleotide
  Target: APOC3; (-) strand; PAM type: YTN; PAM sequence: TTA
cgggcagaggccaggagcgc

SEQ ID NO: 11568 - DNA, 20 bp, Artificial Sequence
  Description of Artificial Sequence: Synthetic oligonucleotide
  Target: APOC3; (-) strand; PAM type: YTN; PAM sequence: CTT
acgggcagaggccaggagcg

SEQ ID NO: 11569 - DNA, 20 bp, Artificial Sequence
  Description of Artificial Sequence: Synthetic oligonucleotide
  Target: APOC3; (-) strand; PAM type: YTN; PAM sequence: CTG
cccccagcccagtcccacca

SEQ ID NO: 11570 - DNA, 20 bp, Artificial Sequence
  Description of Artificial Sequence: Synthetic oligonucleotide
  Target: APOC3; (-) strand; PAM type: YTN; PAM sequence: CTC
caccctgcccccagcccagt

SEQ ID NO: 11571 - DNA, 20 bp, Artificial Sequence
  Description of Artificial Sequence: Synthetic oligonucleotide
  Target: APOC3; (-) strand; PAM type: YTN; PAM sequence: TTG
cctccaccctgcccccagcc

SEQ ID NO: 11572 - DNA, 20 bp, Artificial Sequence
  Description of Artificial Sequence: Synthetic oligonucleotide
  Target: APOC3; (-) strand; PAM type: YTN; PAM sequence: CTG
ggatccccaagttgcctcca

SEQ ID NO: 11573 - DNA, 20 bp, Artificial Sequence
  Description of Artificial Sequence: Synthetic oligonucleotide
  Target: APOC3; (-) strand; PAM type: YTN; PAM sequence: TTG
ggactgggatccccaagttg

SEQ ID NO: 11574 - DNA, 20 bp, Artificial Sequence
  Description of Artificial Sequence: Synthetic oligonucleotide
  Target: APOC3; (-) strand; PAM type: YTN; PAM sequence: TTG
accacccattgggactggga

SEQ ID NO: 11575 - DNA, 20 bp, Artificial Sequence
  Description of Artificial Sequence: Synthetic oligonucleotide
  Target: APOC3; (-) strand; PAM type: YTN; PAM sequence: CTT
gaccacccattgggactggg

SEQ ID NO: 11576 - DNA, 20 bp, Artificial Sequence
  Description of Artificial Sequence: Synthetic oligonucleotide
  Target: APOC3; (-) strand; PAM type: YTN; PAM sequence: CTG
cttgaccacccattgggact

SEQ ID NO: 11577 - DNA, 20 bp, Artificial Sequence
  Description of Artificial Sequence: Synthetic oligonucleotide
  Target: APOC3; (-) strand; PAM type: YTN; PAM sequence: CTC
ctgcttgaccacccattggg

SEQ ID NO: 11578 - DNA, 20 bp, Artificial Sequence
  Description of Artificial Sequence: Synthetic oligonucleotide
  Target: APOC3; (-) strand; PAM type: YTN; PAM sequence: CTG
ggctcctgcttgaccaccca

SEQ ID NO: 11579 - DNA, 20 bp, Artificial Sequence
  Description of Artificial Sequence: Synthetic oligonucleotide
  Target: APOC3; (-) strand; PAM type: YTN; PAM sequence: CTG
gacgagccctgggctcctgc

SEQ ID NO: 11580 - DNA, 20 bp, Artificial Sequence
  Description of Artificial Sequence: Synthetic oligonucleotide
  Target: APOC3; (-) strand; PAM type: YTN; PAM sequence: CTC
tggacgagccctgggctcct

SEQ ID NO: 11581 - DNA, 20 bp, Artificial Sequence
  Description of Artificial Sequence: Synthetic oligonucleotide
  Target: APOC3; (-) strand; PAM type: YTN; PAM sequence: CTG
agtggggtggatcggcctct

SEQ ID NO: 11582 - DNA, 20 bp, Artificial Sequence
  Description of Artificial Sequence: Synthetic oligonucleotide
  Target: APOC3; (-) strand; PAM type: YTN; PAM sequence: CTG
aggaaagagcagggctgagt

SEQ ID NO: 11583 - DNA, 20 bp, Artificial Sequence
  Description of Artificial Sequence: Synthetic oligonucleotide
  Target: APOC3; (-) strand; PAM type: YTN; PAM sequence: CTC
ctgaggaaagagcagggctg

SEQ ID NO: 11584 - DNA, 20 bp, Artificial Sequence
  Description of Artificial Sequence: Synthetic oligonucleotide
  Target: APOC3; (-) strand; PAM type: YTN; PAM sequence: CTG
aagctcctgaggaaagagca

SEQ ID NO: 11585 - DNA, 20 bp, Artificial Sequence
  Description of Artificial Sequence: Synthetic oligonucleotide
  Target: APOC3; (-) strand; PAM type: YTN; PAM sequence: CTC
tgaagctcctgaggaaagag

SEQ ID NO: 11586 - DNA, 20 bp, Artificial Sequence
  Description of Artificial Sequence: Synthetic oligonucleotide
  Target: APOC3; (-) strand; PAM type: YTN; PAM sequence: CTC
ggcctctgaagctcctgagg

SEQ ID NO: 11587 - DNA, 20 bp, Artificial Sequence
  Description of Artificial Sequence: Synthetic oligonucleotide
  Target: APOC3; (-) strand; PAM type: YTN; PAM sequence: CTG
agaagggaggcatcctcggc

SEQ ID NO: 11588 - DNA, 20 bp, Artificial Sequence
  Description of Artificial Sequence: Synthetic oligonucleotide
  Target: APOC3; (-) strand; PAM type: YTN; PAM sequence: CTG
catgaagctgagaagggagg

SEQ ID NO: 11589 - DNA, 20 bp, Artificial Sequence
  Description of Artificial Sequence: Synthetic oligonucleotide
  Target: APOC3; (-) strand; PAM type: YTN; PAM sequence: TTC
atgtaaccctgcatgaagct

SEQ ID NO: 11590 - DNA, 20 bp, Artificial Sequence
  Description of Artificial Sequence: Synthetic oligonucleotide
  Target: APOC3; (-) strand; PAM type: YTN; PAM sequence: CTT
catgtaaccctgcatgaagc

SEQ ID NO: 11591 - DNA, 20 bp, Artificial Sequence
  Description of Artificial Sequence: Synthetic oligonucleotide
  Target: APOC3; (-) strand; PAM type: YTN; PAM sequence: TTG
gtggcgtgcttcatgtaacc

SEQ ID NO: 11592 - DNA, 20 bp, Artificial Sequence
  Description of Artificial Sequence: Synthetic oligonucleotide
  Target: APOC3; (-) strand; PAM type: YTN; PAM sequence: CTT
ggtggcgtgcttcatgtaac

SEQ ID NO: 11593 - DNA, 20 bp, Artificial Sequence
  Description of Artificial Sequence: Synthetic oligonucleotide
  Target: APOC3; (-) strand; PAM type: YTN; PAM sequence: TTG
gcggtcttggtggcgtgctt

SEQ ID NO: 11594 - DNA, 20 bp, Artificial Sequence
  Description of Artificial Sequence: Synthetic oligonucleotide
  Target: APOC3; (-) strand; PAM type: YTN; PAM sequence: CTT
ggcggtcttggtggcgtgct

SEQ ID NO: 11595 - DNA, 20 bp, Artificial Sequence
  Description of Artificial Sequence: Synthetic oligonucleotide
  Target: APOC3; (-) strand; PAM type: YTN; PAM sequence: CTC
agtgcatccttggcggtctt

SEQ ID NO: 11596 - DNA, 20 bp, Artificial Sequence
  Description of Artificial Sequence: Synthetic oligonucleotide
  Target: APOC3; (-) strand; PAM type: YTN; PAM sequence: CTG
ctcagtgcatccttggcggt

SEQ ID NO: 11597 - DNA, 20 bp, Artificial Sequence
  Description of Artificial Sequence: Synthetic oligonucleotide
  Target: APOC3; (-) strand; PAM type: YTN; PAM sequence: CTG
cacgctgctcagtgcatcct

SEQ ID NO: 11598 - DNA, 20 bp, Artificial Sequence
  Description of Artificial Sequence: Synthetic oligonucleotide
  Target: APOC3; (-) strand; PAM type: YTN; PAM sequence: CTC
ctgcacgctgctcagtgcat

SEQ ID NO: 11599 - DNA, 20 bp, Artificial Sequence
  Description of Artificial Sequence: Synthetic oligonucleotide
  Target: APOC3; (-) strand; PAM type: YTN; PAM sequence: CTG
ggactcctgcacgctgctca

SEQ ID NO: 11600 - DNA, 20 bp, Artificial Sequence
  Description of Artificial Sequence: Synthetic oligonucleotide
  Target: APOC3; (-) strand; PAM type: YTN; PAM sequence: CTG
ggccacctgggactcctgca

SEQ ID NO: 11601 - DNA, 20 bp, Artificial Sequence
  Description of Artificial Sequence: Synthetic oligonucleotide
  Target: APOC3; (-) strand; PAM type: YTN; PAM sequence: CTG
ctgggccacctgggactcct

SEQ ID NO: 11602 - DNA, 20 bp, Artificial Sequence
  Description of Artificial Sequence: Synthetic oligonucleotide
  Target: APOC3; (-) strand; PAM type: YTN; PAM sequence: CTG
gcctgctgggccacctggga

SEQ ID NO: 11603 - DNA, 20 bp, Artificial Sequence
  Description of Artificial Sequence: Synthetic oligonucleotide
  Target: APOC3; (-) strand; PAM type: YTN; PAM sequence: CTG
gcaggggggatggggaggga

SEQ ID NO: 11604 - DNA, 20 bp, Artificial Sequence
  Description of Artificial Sequence: Synthetic oligonucleotide
  Target: APOC3; (-) strand; PAM type: YTN; PAM sequence: CTC
accagggcaggggcgggtgg

SEQ ID NO: 11605 - DNA, 20 bp, Artificial Sequence
  Description of Artificial Sequence: Synthetic oligonucleotide
  Target: APOC3; (-) strand; PAM type: YTN; PAM sequence: TTG
ggatctcaccagggcagggg

SEQ ID NO: 11606 - DNA, 20 bp, Artificial Sequence
  Description of Artificial Sequence: Synthetic oligonucleotide
  Target: APOC3; (-) strand; PAM type: YTN; PAM sequence: TTG
ttgggatctcaccagggcag

SEQ ID NO: 11607 - DNA, 20 bp, Artificial Sequence
  Description of Artificial Sequence: Synthetic oligonucleotide
  Target: APOC3; (-) strand; PAM type: YTN; PAM sequence: TTC
cattgttgggatctcaccag

SEQ ID NO: 11608 - DNA, 20 bp, Artificial Sequence
  Description of Artificial Sequence: Synthetic oligonucleotide
  Target: APOC3; (-) strand; PAM type: YTN; PAM sequence: CTC
cattccattgttgggatctc

SEQ ID NO: 11609 - DNA, 20 bp, Artificial Sequence
  Description of Artificial Sequence: Synthetic oligonucleotide
  Target: APOC3; (-) strand; PAM type: YTN; PAM sequence: CTG
gagcacctccattccattgt

SEQ ID NO: 11610 - DNA, 20 bp, Artificial Sequence
  Description of Artificial Sequence: Synthetic oligonucleotide
  Target: APOC3; (-) strand; PAM type: YTN; PAM sequence: CTG
aagaggcacaggcccagggg

SEQ ID NO: 11611 - DNA, 20 bp, Artificial Sequence
  Description of Artificial Sequence: Synthetic oligonucleotide
  Target: APOC3; (-) strand; PAM type: YTN; PAM sequence: CTG
tgaggaaagaggaggctgaa

SEQ ID NO: 11612 - DNA, 20 bp, Artificial Sequence
  Description of Artificial Sequence: Synthetic oligonucleotide
  Target: APOC3; (-) strand; PAM type: YTN; PAM sequence: CTG
acaaaggccctgtgaggaaa

SEQ ID NO: 11613 - DNA, 20 bp, Artificial Sequence
  Description of Artificial Sequence: Synthetic oligonucleotide
  Target: APOC3; (-) strand; PAM type: YTN; PAM sequence: CTC
ccgcagcagcctgacaaagg

SEQ ID NO: 11614 - DNA, 20 bp, Artificial Sequence
  Description of Artificial Sequence: Synthetic oligonucleotide
  Target: APOC3; (-) strand; PAM type: YTN; PAM sequence: CTC
tcccgcagcagcctgacaaa

SEQ ID NO: 11615 - DNA, 20 bp, Artificial Sequence
  Description of Artificial Sequence: Synthetic oligonucleotide
  Target: APOC3; (-) strand; PAM type: YTN; PAM sequence: CTG
tcatctctcccgcagcagcc

SEQ ID NO: 11616 - DNA, 20 bp, Artificial Sequence
  Description of Artificial Sequence: Synthetic oligonucleotide
  Target: APOC3; (-) strand; PAM type: YTN; PAM sequence: CTC
tgtcatctctcccgcagcag

SEQ ID NO: 11617 - DNA, 20 bp, Artificial Sequence
  Description of Artificial Sequence: Synthetic oligonucleotide
  Target: APOC3; (-) strand; PAM type: YTN; PAM sequence: CTC
aactctgtcatctctcccgc

SEQ ID NO: 11618 - DNA, 20 bp, Artificial Sequence
  Description of Artificial Sequence: Synthetic oligonucleotide
  Target: APOC3; (-) strand; PAM type: YTN; PAM sequence: CTG
ggaggaatgcagtctcaact

SEQ ID NO: 11619 - DNA, 20 bp, Artificial Sequence
  Description of Artificial Sequence: Synthetic oligonucleotide
  Target: APOC3; (-) strand; PAM type: YTN; PAM sequence: CTC
cggggagaaaggagggacct

SEQ ID NO: 11620 - DNA, 20 bp, Artificial Sequence
  Description of Artificial Sequence: Synthetic oligonucleotide
  Target: APOC3; (-) strand; PAM type: YTN; PAM sequence: CTG
ctccggggagaaaggaggga

SEQ ID NO: 11621 - DNA, 20 bp, Artificial Sequence
  Description of Artificial Sequence: Synthetic oligonucleotide
  Target: APOC3; (-) strand; PAM type: YTN; PAM sequence: CTA
ggactgctccggggagaaag

SEQ ID NO: 11622 - DNA, 20 bp, Artificial Sequence
  Description of Artificial Sequence: Synthetic oligonucleotide
  Target: APOC3; (-) strand; PAM type: YTN; PAM sequence: CTA
aaacggcacgccctaggact

SEQ ID NO: 11623 - DNA, 20 bp, Artificial Sequence
  Description of Artificial Sequence: Synthetic oligonucleotide
  Target: APOC3; (-) strand; PAM type: YTN; PAM sequence: TTA
aaaaaaaaagaagaagaaag

SEQ ID NO: 11624 - DNA, 20 bp, Artificial Sequence
  Description of Artificial Sequence: Synthetic oligonucleotide
  Target: APOC3; (-) strand; PAM type: YTN; PAM sequence: CTC
cattaaaaaaaaaagaagaa

SEQ ID NO: 11625 - DNA, 20 bp, Artificial Sequence
  Description of Artificial Sequence: Synthetic oligonucleotide
  Target: APOC3; (-) strand; PAM type: YTN; PAM sequence: CTA
ggtgacagagggagactcca

SEQ ID NO: 11626 - DNA, 20 bp, Artificial Sequence
  Description of Artificial Sequence: Synthetic oligonucleotide
  Target: APOC3; (-) strand; PAM type: YTN; PAM sequence: CTC
cagcctaggtgacagaggga

SEQ ID NO: 11627 - DNA, 20 bp, Artificial Sequence
  Description of Artificial Sequence: Synthetic oligonucleotide
  Target: APOC3; (-) strand; PAM type: YTN; PAM sequence: CTG
cactccagcctaggtgacag

SEQ ID NO: 11628 - DNA, 20 bp, Artificial Sequence
  Description of Artificial Sequence: Synthetic oligonucleotide
  Target: APOC3; (-) strand; PAM type: YTN; PAM sequence: TTG
cagtgagccgagatggcacc

SEQ ID NO: 11629 - DNA, 20 bp, Artificial Sequence
  Description of Artificial Sequence: Synthetic oligonucleotide
  Target: APOC3; (-) strand; PAM type: YTN; PAM sequence: TTG
aacccgggagacggaggttg

SEQ ID NO: 11630 - DNA, 20 bp, Artificial Sequence
  Description of Artificial Sequence: Synthetic oligonucleotide
  Target: APOC3; (-) strand; PAM type: YTN; PAM sequence: CTG
aggcaggagaatgggttgaa

SEQ ID NO: 11631 - DNA, 20 bp, Artificial Sequence
  Description of Artificial Sequence: Synthetic oligonucleotide
  Target: APOC3; (-) strand; PAM type: YTN; PAM sequence: TTG
ggaggctgaggcaggagaat

SEQ ID NO: 11632 - DNA, 20 bp, Artificial Sequence
  Description of Artificial Sequence: Synthetic oligonucleotide
  Target: APOC3; (-) strand; PAM type: YTN; PAM sequence: CTT
gggaggctgaggcaggagaa

SEQ ID NO: 11633 - DNA, 20 bp, Artificial Sequence
  Description of Artificial Sequence: Synthetic oligonucleotide
  Target: APOC3; (-) strand; PAM type: YTN; PAM sequence: CTA
cttgggaggctgaggcagga

SEQ ID NO: 11634 - DNA, 20 bp, Artificial Sequence
  Description of Artificial Sequence: Synthetic oligonucleotide
  Target: APOC3; (-) strand; PAM type: YTN; PAM sequence: CTG
taatcccagctacttgggag

SEQ ID NO: 11635 - DNA, 20 bp, Artificial Sequence
  Description of Artificial Sequence: Synthetic oligonucleotide
  Target: APOC3; (-) strand; PAM type: YTN; PAM sequence: CTG
ggtgtggtggcgcgtgcctg

SEQ ID NO: 11636 - DNA, 20 bp, Artificial Sequence
  Description of Artificial Sequence: Synthetic oligonucleotide
  Target: APOC3; (-) strand; PAM type: YTN; PAM sequence: TTA
gctgggtgtggtggcgcgtg

SEQ ID NO: 11637 - DNA, 20 bp, Artificial Sequence
  Description of Artificial Sequence: Synthetic oligonucleotide
  Target: APOC3; (-) strand; PAM type: YTN; PAM sequence: CTA
aaaatacaaaaattagctgg

SEQ ID NO: 11638 - DNA, 20 bp, Artificial Sequence
  Description of Artificial Sequence: Synthetic oligonucleotide
  Target: APOC3; (-) strand; PAM type: YTN; PAM sequence: CTG
ctaaaaatacaaaaattagc

SEQ ID NO: 11639 - DNA, 20 bp, Artificial Sequence
  Description of Artificial Sequence: Synthetic oligonucleotide
  Target: APOC3; (-) strand; PAM type: YTN; PAM sequence: CTC
tgctaaaaatacaaaaatta

SEQ ID NO: 11640 - DNA, 20 bp, Artificial Sequence
  Description of Artificial Sequence: Synthetic oligonucleotide
  Target: APOC3; (-) strand; PAM type: YTN; PAM sequence: CTG
gccaacatggtgaaacccca

SEQ ID NO: 11641 - DNA, 20 bp, Artificial Sequence
  Description of Artificial Sequence: Synthetic oligonucleotide
  Target: APOC3; (-) strand; PAM type: YTN; PAM sequence: TTC
aagaccaacctggccaacat

SEQ ID NO: 11642 - DNA, 20 bp, Artificial Sequence
  Description of Artificial Sequence: Synthetic oligonucleotide
  Target: APOC3; (-) strand; PAM type: YTN; PAM sequence: CTG
aggtcaggaattcaagacca

SEQ ID NO: 11643 - DNA, 20 bp, Artificial Sequence
  Description of Artificial Sequence: Synthetic oligonucleotide
  Target: APOC3; (-) strand; PAM type: YTN; PAM sequence: TTG
ggaggccgaggcaggaggat

SEQ ID NO: 11644 - DNA, 20 bp, Artificial Sequence
  Description of Artificial Sequence: Synthetic oligonucleotide
  Target: APOC3; (-) strand; PAM type: YTN; PAM sequence: TTT
gggaggccgaggcaggagga

SEQ ID NO: 11645 - DNA, 20 bp, Artificial Sequence
  Description of Artificial Sequence: Synthetic oligonucleotide
  Target: APOC3; (-) strand; PAM type: YTN; PAM sequence: CTT
tgggaggccgaggcaggagg

SEQ ID NO: 11646 - DNA, 20 bp, Artificial Sequence
  Description of Artificial Sequence: Synthetic oligonucleotide
  Target: APOC3; (-) strand; PAM type: YTN; PAM sequence: CTG
taatcccagcactttgggag

SEQ ID NO: 11647 - DNA, 20 bp, Artificial Sequence
  Description of Artificial Sequence: Synthetic oligonucleotide
  Target: APOC3; (-) strand; PAM type: YTN; PAM sequence: CTC
atgcctgtaatcccagcact

SEQ ID NO: 11648 - DNA, 20 bp, Artificial Sequence
  Description of Artificial Sequence: Synthetic oligonucleotide
  Target: APOC3; (-) strand; PAM type: YTN; PAM sequence: TTC
agaaaaggaaaatggggcca

SEQ ID NO: 11649 - DNA, 20 bp, Artificial Sequence
  Description of Artificial Sequence: Synthetic oligonucleotide
  Target: APOC3; (-) strand; PAM type: YTN; PAM sequence: CTT
cagaaaaggaaaatggggcc

SEQ ID NO: 11650 - DNA, 20 bp, Artificial Sequence
  Description of Artificial Sequence: Synthetic oligonucleotide
  Target: APOC3; (-) strand; PAM type: YTN; PAM sequence: CTA
gccagaccttcagaaaagga

SEQ ID NO: 11651 - DNA, 20 bp, Artificial Sequence
  Description of Artificial Sequence: Synthetic oligonucleotide
  Target: APOC3; (-) strand; PAM type: YTN; PAM sequence: CTC
tagccagaccttcagaaaag

SEQ ID NO: 11652 - DNA, 20 bp, Artificial Sequence
  Description of Artificial Sequence: Synthetic oligonucleotide
  Target: APOC3; (-) strand; PAM type: YTN; PAM sequence: CTG
ctctagccagaccttcagaa

SEQ ID NO: 11653 - DNA, 20 bp, Artificial Sequence
  Description of Artificial Sequence: Synthetic oligonucleotide
  Target: APOC3; (-) strand; PAM type: YTN; PAM sequence: CTG
aggaccactgctctagccag

SEQ ID NO: 11654 - DNA, 20 bp, Artificial Sequence
  Description of Artificial Sequence: Synthetic oligonucleotide
  Target: APOC3; (-) strand; PAM type: YTN; PAM sequence: CTG
gtgccaaaaaggctgaggac

SEQ ID NO: 11655 - DNA, 20 bp, Artificial Sequence
  Description of Artificial Sequence: Synthetic oligonucleotide
  Target: APOC3; (-) strand; PAM type: YTN; PAM sequence: CTG
gtccctggtgccaaaaaggc

SEQ ID NO: 11656 - DNA, 20 bp, Artificial Sequence
  Description of Artificial Sequence: Synthetic oligonucleotide
  Target: APOC3; (-) strand; PAM type: YTN; PAM sequence: TTG
tccaccacaaaactggtccc

SEQ ID NO: 11657 - DNA, 20 bp, Artificial Sequence
  Description of Artificial Sequence: Synthetic oligonucleotide
  Target: APOC3; (-) strand; PAM type: YTN; PAM sequence: CTG
gcccatggaaaaattgtcca

SEQ ID NO: 11658 - DNA, 20 bp, Artificial Sequence
  Description of Artificial Sequence: Synthetic oligonucleotide
  Target: APOC3; (-) strand; PAM type: YTN; PAM sequence: TTC
atcccaaaaccatccccgct

SEQ ID NO: 11659 - DNA, 20 bp, Artificial Sequence
  Description of Artificial Sequence: Synthetic oligonucleotide
  Target: APOC3; (-) strand; PAM type: YTN; PAM sequence: CTT
catcccaaaaccatccccgc

SEQ ID NO: 11660 - DNA, 20 bp, Artificial Sequence
  Description of Artificial Sequence: Synthetic oligonucleotide
  Target: APOC3; (-) strand; PAM type: YTN; PAM sequence: CTG
aggtggaacagcttcatccc

SEQ ID NO: 11661 - DNA, 20 bp, Artificial Sequence
  Description of Artificial Sequence: Synthetic oligonucleotide
  Target: APOC3; (-) strand; PAM type: YTN; PAM sequence: CTG
atgatctgaggtggaacagc

SEQ ID NO: 11662 - DNA, 20 bp, Artificial Sequence
  Description of Artificial Sequence: Synthetic oligonucleotide
  Target: APOC3; (-) strand; PAM type: YTN; PAM sequence: CTA
atgcctgatgatctgaggtg

SEQ ID NO: 11663 - DNA, 20 bp, Artificial Sequence
  Description of Artificial Sequence: Synthetic oligonucleotide
  Target: APOC3; (-) strand; PAM type: YTN; PAM sequence: TTA
tgagaatctaatgcctgatg

SEQ ID NO: 11664 - DNA, 20 bp, Artificial Sequence
  Description of Artificial Sequence: Synthetic oligonucleotide
  Target: APOC3; (-) strand; PAM type: YTN; PAM sequence: CTT
atgagaatctaatgcctgat

SEQ ID NO: 11665 - DNA, 20 bp, Artificial Sequence
  Description of Artificial Sequence: Synthetic oligonucleotide
  Target: APOC3; (-) strand; PAM type: YTN; PAM sequence: CTC
cttatgagaatctaatgcct

SEQ ID NO: 11666 - DNA, 20 bp, Artificial Sequence
  Description of Artificial Sequence: Synthetic oligonucleotide
  Target: APOC3; (-) strand; PAM type: YTN; PAM sequence: CTA
ggtggagggctccttatgag

SEQ ID NO: 11667 - DNA, 20 bp, Artificial Sequence
  Description of Artificial Sequence: Synthetic oligonucleotide
  Target: APOC3; (-) strand; PAM type: YTN; PAM sequence: CTG
cacatgccagggatctaggt

SEQ ID NO: 11668 - DNA, 20 bp, Artificial Sequence
  Description of Artificial Sequence: Synthetic oligonucleotide
  Target: APOC3; (-) strand; PAM type: YTN; PAM sequence: TTG
tgaactgcacatgccaggga

SEQ ID NO: 11669 - DNA, 20 bp, Artificial Sequence
  Description of Artificial Sequence: Synthetic oligonucleotide
  Target: APOC3; (-) strand; PAM type: YTN; PAM sequence: CTA
ttgtgaactgcacatgccag

SEQ ID NO: 11670 - DNA, 20 bp, Artificial Sequence
  Description of Artificial Sequence: Synthetic oligonucleotide
  Target: APOC3; (-) strand; PAM type: YTN; PAM sequence: CTC
ataggagtgtgaaccctatt

SEQ ID NO: 11671 - DNA, 20 bp, Artificial Sequence
  Description of Artificial Sequence: Synthetic oligonucleotide
  Target: APOC3; (-) strand; PAM type: YTN; PAM sequence: TTC
tcataggagtgtgaacccta

SEQ ID NO: 11672 - DNA, 20 bp, Artificial Sequence
  Description of Artificial Sequence: Synthetic oligonucleotide
  Target: APOC3; (-) strand; PAM type: YTN; PAM sequence: TTA
cattctcataggagtgtgaa

SEQ ID NO: 11673 - DNA, 20 bp, Artificial Sequence
  Description of Artificial Sequence: Synthetic oligonucleotide
  Target: APOC3; (-) strand; PAM type: YTN; PAM sequence: CTT
acattctcataggagtgtga

SEQ ID NO: 11674 - DNA, 20 bp, Artificial Sequence
  Description of Artificial Sequence: Synthetic oligonucleotide
  Target: APOC3; (-) strand; PAM type: YTN; PAM sequence: CTG
tcagatcaagtggccttaca

SEQ ID NO: 11675 - DNA, 20 bp, Artificial Sequence
  Description of Artificial Sequence: Synthetic oligonucleotide
  Target: APOC3; (-) strand; PAM type: YTN; PAM sequence: CTC
ctgtcagatcaagtggcctt

SEQ ID NO: 11676 - DNA, 20 bp, Artificial Sequence
  Description of Artificial Sequence: Synthetic oligonucleotide
  Target: APOC3; (-) strand; PAM type: YTN; PAM sequence: CTC
cgcctcctgtcagatcaagt

SEQ ID NO: 11677 - DNA, 20 bp, Artificial Sequence
  Description of Artificial Sequence: Synthetic oligonucleotide
  Target: APOC3; (-) strand; PAM type: YTN; PAM sequence: CTG
agctccgcctcctgtcagat

SEQ ID NO: 11678 - DNA, 20 bp, Artificial Sequence
  Description of Artificial Sequence: Synthetic oligonucleotide
  Target: APOC3; (-) strand; PAM type: YTN; PAM sequence: CTG
cacagcacgaagtgagtggt

SEQ ID NO: 11679 - DNA, 20 bp, Artificial Sequence
  Description of Artificial Sequence: Synthetic oligonucleotide
  Target: APOC3; (-) strand; PAM type: YTN; PAM sequence: TTA
ggagccgggctgcacagcac

SEQ ID NO: 11680 - DNA, 20 bp, Artificial Sequence
  Description of Artificial Sequence: Synthetic oligonucleotide
  Target: APOC3; (-) strand; PAM type: YTN; PAM sequence: CTG
ttaggagccgggctgcacag

SEQ ID NO: 11681 - DNA, 20 bp, Artificial Sequence
  Description of Artificial Sequence: Synthetic oligonucleotide
  Target: APOC3; (-) strand; PAM type: YTN; PAM sequence: CTG
gtccatggactgttaggagc

SEQ ID NO: 11682 - DNA, 20 bp, Artificial Sequence
  Description of Artificial Sequence: Synthetic oligonucleotide
  Target: APOC3; (-) strand; PAM type: YTN; PAM sequence: CTA
gcccaggggtccccaacccc

SEQ ID NO: 11683 - DNA, 20 bp, Artificial Sequence
  Description of Artificial Sequence: Synthetic oligonucleotide
  Target: APOC3; (-) strand; PAM type: YTN; PAM sequence: CTC
ccaaggcaaacccctagccc

SEQ ID NO: 11684 - DNA, 20 bp, Artificial Sequence
  Description of Artificial Sequence: Synthetic oligonucleotide
  Target: APOC3; (-) strand; PAM type: YTN; PAM sequence: TTG
ggtcaggtggggcctcccaa

SEQ ID NO: 11685 - DNA, 20 bp, Artificial Sequence
  Description of Artificial Sequence: Synthetic oligonucleotide
  Target: APOC3; (-) strand; PAM type: YTN; PAM sequence: TTG
aattgggtcaggtggggcct

SEQ ID NO: 11686 - DNA, 20 bp, Artificial Sequence
  Description of Artificial Sequence: Synthetic oligonucleotide
  Target: APOC3; (-) strand; PAM type: YTN; PAM sequence: CTT
gaattgggtcaggtggggcc

SEQ ID NO: 11687 - DNA, 20 bp, Artificial Sequence
  Description of Artificial Sequence: Synthetic oligonucleotide
  Target: APOC3; (-) strand; PAM type: YTN; PAM sequence: CTC
acgggcttgaattgggtcag

SEQ ID NO: 11688 - DNA, 20 bp, Artificial Sequence
  Description of Artificial Sequence: Synthetic oligonucleotide
  Target: APOC3; (-) strand; PAM type: YTN; PAM sequence: TTA
gaacaaagcagaagcactca

SEQ ID NO: 11689 - DNA, 20 bp, Artificial Sequence
  Description of Artificial Sequence: Synthetic oligonucleotide
  Target: APOC3; (-) strand; PAM type: YTN; PAM sequence: CTT
agaacaaagcagaagcactc

SEQ ID NO: 11690 - DNA, 20 bp, Artificial Sequence
  Description of Artificial Sequence: Synthetic oligonucleotide
  Target: APOC3; (-) strand; PAM type: YTN; PAM sequence: CTG
gccccaggtcttagaacaaa

SEQ ID NO: 11691 - DNA, 20 bp, Artificial Sequence
  Description of Artificial Sequence: Synthetic oligonucleotide
  Target: APOC3; (-) strand; PAM type: YTN; PAM sequence: CTC
acactggccccaggtcttag

SEQ ID NO: 11692 - DNA, 20 bp, Artificial Sequence
  Description of Artificial Sequence: Synthetic oligonucleotide
  Target: APOC3; (-) strand; PAM type: YTN; PAM sequence: CTG
ctcacactggccccaggtct

SEQ ID NO: 11693 - DNA, 20 bp, Artificial Sequence
  Description of Artificial Sequence: Synthetic oligonucleotide
  Target: APOC3; (-) strand; PAM type: YTN; PAM sequence: TTC
tgctcacactggccccaggt

SEQ ID NO: 11694 - DNA, 20 bp, Artificial Sequence
  Description of Artificial Sequence: Synthetic oligonucleotide
  Target: APOC3; (-) strand; PAM type: YTN; PAM sequence: CTT
ctgctcacactggccccagg

SEQ ID NO: 11695 - DNA, 20 bp, Artificial Sequence
  Description of Artificial Sequence: Synthetic oligonucleotide
  Target: APOC3; (-) strand; PAM type: YTN; PAM sequence: CTG
atgggcaggggcaggatggg

SEQ ID NO: 11696 - DNA, 20 bp, Artificial Sequence
  Description of Artificial Sequence: Synthetic oligonucleotide
  Target: APOC3; (-) strand; PAM type: YTN; PAM sequence: CTA
atgccagtcagggtgaggtg

SEQ ID NO: 11697 - DNA, 20 bp, Artificial Sequence
  Description of Artificial Sequence: Synthetic oligonucleotide
  Target: APOC3; (-) strand; PAM type: YTN; PAM sequence: CTA
tgccagctaatgccagtcag

SEQ ID NO: 11698 - DNA, 20 bp, Artificial Sequence
  Description of Artificial Sequence: Synthetic oligonucleotide
  Target: APOC3; (-) strand; PAM type: YTN; PAM sequence: CTG
ctatgccagctaatgccagt

SEQ ID NO: 11699 - DNA, 20 bp, Artificial Sequence
  Description of Artificial Sequence: Synthetic oligonucleotide
  Target: APOC3; (-) strand; PAM type: YTN; PAM sequence: CTC
tgctatgccagctaatgcca

SEQ ID NO: 11700 - DNA, 20 bp, Artificial Sequence
  Description of Artificial Sequence: Synthetic oligonucleotide
  Target: APOC3; (-) strand; PAM type: YTN; PAM sequence: TTA
tgaacacctctgctatgcca

SEQ ID NO: 11701 - DNA, 20 bp, Artificial Sequence
  Description of Artificial Sequence: Synthetic oligonucleotide
  Target: APOC3; (-) strand; PAM type: YTN; PAM sequence: TTT
atgaacacctctgctatgcc

SEQ ID NO: 11702 - DNA, 20 bp, Artificial Sequence
  Description of Artificial Sequence: Synthetic oligonucleotide
  Target: APOC3; (-) strand; PAM type: YTN; PAM sequence: CTA
agaatgtttatgaacacctc

SEQ ID NO: 11703 - DNA, 20 bp, Artificial Sequence
  Description of Artificial Sequence: Synthetic oligonucleotide
  Target: APOC3; (-) strand; PAM type: YTN; PAM sequence: CTG
gggactaagaatgtttatga

SEQ ID NO: 11704 - DNA, 20 bp, Artificial Sequence
  Description of Artificial Sequence: Synthetic oligonucleotide
  Target: APOC3; (-) strand; PAM type: YTN; PAM sequence: TTC
tggggactaagaatgtttat

SEQ ID NO: 11705 - DNA, 20 bp, Artificial Sequence
  Description of Artificial Sequence: Synthetic oligonucleotide
  Target: APOC3; (-) strand; PAM type: YTN; PAM sequence: CTA
ccccaaagccggttctgggg

SEQ ID NO: 11706 - DNA, 20 bp, Artificial Sequence
  Description of Artificial Sequence: Synthetic oligonucleotide
  Target: APOC3; (-) strand; PAM type: YTN; PAM sequence: CTG
caaagtgagaaaataacacc

SEQ ID NO: 11707 - DNA, 20 bp, Artificial Sequence
  Description of Artificial Sequence: Synthetic oligonucleotide
  Target: APOC3; (-) strand; PAM type: YTN; PAM sequence: CTC
atctgcaaagtgagaaaata

SEQ ID NO: 11708 - DNA, 20 bp, Artificial Sequence
  Description of Artificial Sequence: Synthetic oligonucleotide
  Target: APOC3; (-) strand; PAM type: YTN; PAM sequence: TTC
tcatctgcaaagtgagaaaa

SEQ ID NO: 11709 - DNA, 20 bp, Artificial Sequence
  Description of Artificial Sequence: Synthetic oligonucleotide
  Target: APOC3; (-) strand; PAM type: YTN; PAM sequence: TTT
ctcatctgcaaagtgagaaa

SEQ ID NO: 11710 - DNA, 20 bp, Artificial Sequence
  Description of Artificial Sequence: Synthetic oligonucleotide
  Target: APOC3; (-) strand; PAM type: YTN; PAM sequence: TTT
tctcatctgcaaagtgagaa

SEQ ID NO: 11711 - DNA, 20 bp, Artificial Sequence
  Description of Artificial Sequence: Synthetic oligonucleotide
  Target: APOC3; (-) strand; PAM type: YTN; PAM sequence: CTC
aattttctcatctgcaaagt

SEQ ID NO: 11712 - DNA, 20 bp, Artificial Sequence
  Description of Artificial Sequence: Synthetic oligonucleotide
  Target: APOC3; (-) strand; PAM type: YTN; PAM sequence: CTG
agcctcaattttctcatctg

SEQ ID NO: 11713 - DNA, 20 bp, Artificial Sequence
  Description of Artificial Sequence: Synthetic oligonucleotide
  Target: APOC3; (-) strand; PAM type: YTN; PAM sequence: CTC
tgagcctcaattttctcatc

SEQ ID NO: 11714 - DNA, 20 bp, Artificial Sequence
  Description of Artificial Sequence: Synthetic oligonucleotide
  Target: APOC3; (-) strand; PAM type: YTN; PAM sequence: CTA
atcgctctgagcctcaattt

SEQ ID NO: 11715 - DNA, 20 bp, Artificial Sequence
  Description of Artificial Sequence: Synthetic oligonucleotide
  Target: APOC3; (-) strand; PAM type: YTN; PAM sequence: CTG
gggcaggtcacctaatcgct

SEQ ID NO: 11716 - DNA, 20 bp, Artificial Sequence
  Description of Artificial Sequence: Synthetic oligonucleotide
  Target: APOC3; (-) strand; PAM type: YTN; PAM sequence: TTG
tgtgatctggggcaggtcac

SEQ ID NO: 11717 - DNA, 20 bp, Artificial Sequence
  Description of Artificial Sequence: Synthetic oligonucleotide
  Target: APOC3; (-) strand; PAM type: YTN; PAM sequence: TTA
gttgtgtgatctggggcagg

SEQ ID NO: 11718 - DNA, 20 bp, Artificial Sequence
  Description of Artificial Sequence: Synthetic oligonucleotide
  Target: APOC3; (-) strand; PAM type: YTN; PAM sequence: TTG
attagttgtgtgatctgggg

SEQ ID NO: 11719 - DNA, 20 bp, Artificial Sequence
  Description of Artificial Sequence: Synthetic oligonucleotide
  Target: APOC3; (-) strand; PAM type: YTN; PAM sequence: TTG
gaggattgattagttgtgtg

SEQ ID NO: 11720 - DNA, 20 bp, Artificial Sequence
  Description of Artificial Sequence: Synthetic oligonucleotide
  Target: APOC3; (-) strand; PAM type: YTN; PAM sequence: TTG
gaaagtcattggaggattga

SEQ ID NO: 11721 - DNA, 20 bp, Artificial Sequence
  Description of Artificial Sequence: Synthetic oligonucleotide
  Target: APOC3; (-) strand; PAM type: YTN; PAM sequence: TTT
ggaaagtcattggaggattg

SEQ ID NO: 11722 - DNA, 20 bp, Artificial Sequence
  Description of Artificial Sequence: Synthetic oligonucleotide
  Target: APOC3; (-) strand; PAM type: YTN; PAM sequence: CTC
atttggaaagtcattggagg

SEQ ID NO: 11723 - DNA, 20 bp, Artificial Sequence
  Description of Artificial Sequence: Synthetic oligonucleotide
  Target: APOC3; (-) strand; PAM type: YTN; PAM sequence: CTC
tcatttggaaagtcattgga

SEQ ID NO: 11724 - DNA, 20 bp, Artificial Sequence
  Description of Artificial Sequence: Synthetic oligonucleotide
  Target: APOC3; (-) strand; PAM type: YTN; PAM sequence: CTG
agcagggtaggacagaggga

SEQ ID NO: 11725 - DNA, 20 bp, Artificial Sequence
  Description of Artificial Sequence: Synthetic oligonucleotide
  Target: APOC3; (-) strand; PAM type: YTN; PAM sequence: CTC
tgagcagggtaggacagagg

SEQ ID NO: 11726 - DNA, 20 bp, Artificial Sequence
  Description of Artificial Sequence: Synthetic oligonucleotide
  Target: APOC3; (-) strand; PAM type: YTN; PAM sequence: CTG
gtggctctgagcagggtagg

SEQ ID NO: 11727 - DNA, 20 bp, Artificial Sequence
  Description of Artificial Sequence: Synthetic oligonucleotide
  Target: APOC3; (-) strand; PAM type: YTN; PAM sequence: TTG
cacaacctggtggctctgag

SEQ ID NO: 11728 - DNA, 20 bp, Artificial Sequence
  Description of Artificial Sequence: Synthetic oligonucleotide
  Target: APOC3; (-) strand; PAM type: YTN; PAM sequence: CTG
gagttgcacaacctggtggc

SEQ ID NO: 11729 - DNA, 20 bp, Artificial Sequence
  Description of Artificial Sequence: Synthetic oligonucleotide
  Target: APOC3; (-) strand; PAM type: YTN; PAM sequence: CTG
tgcaaacagcaccgcctgga

SEQ ID NO: 11730 - DNA, 20 bp, Artificial Sequence
  Description of Artificial Sequence: Synthetic oligonucleotide
  Target: APOC3; (-) strand; PAM type: YTN; PAM sequence: TTC
tgtgcaaacagcaccgcctg

SEQ ID NO: 11731 - DNA, 20 bp, Artificial Sequence
  Description of Artificial Sequence: Synthetic oligonucleotide
  Target: APOC3; (-) strand; PAM type: YTN; PAM sequence: TTT
ctgtgcaaacagcaccgcct

SEQ ID NO: 11732 - DNA, 20 bp, Artificial Sequence
  Description of Artificial Sequence: Synthetic oligonucleotide
  Target: APOC3; (-) strand; PAM type: YTN; PAM sequence: TTT
tctgtgcaaacagcaccgcc

SEQ ID NO: 11733 - DNA, 20 bp, Artificial Sequence
  Description of Artificial Sequence: Synthetic oligonucleotide
  Target: APOC3; (-) strand; PAM type: YTN; PAM sequence: TTG
ttttctgtgcaaacagcacc

SEQ ID NO: 11734 - DNA, 20 bp, Artificial Sequence
  Description of Artificial Sequence: Synthetic oligonucleotide
  Target: APOC3; (-) strand; PAM type: YTN; PAM sequence: CTG
tcattgttttctgtgcaaac

SEQ ID NO: 11735 - DNA, 20 bp, Artificial Sequence
  Description of Artificial Sequence: Synthetic oligonucleotide
  Target: APOC3; (-) strand; PAM type: YTN; PAM sequence: CTG
aggcacaaagtgacagggtg

SEQ ID NO: 11736 - DNA, 20 bp, Artificial Sequence
  Description of Artificial Sequence: Synthetic oligonucleotide
  Target: APOC3; (-) strand; PAM type: YTN; PAM sequence: CTG
ggcctgaggcacaaagtgac

SEQ ID NO: 11737 - DNA, 20 bp, Artificial Sequence
  Description of Artificial Sequence: Synthetic oligonucleotide
  Target: APOC3; (-) strand; PAM type: YTN; PAM sequence: TTA
tgcccctgggcctgaggcac

SEQ ID NO: 11738 - DNA, 20 bp, Artificial Sequence
  Description of Artificial Sequence: Synthetic oligonucleotide
  Target: APOC3; (-) strand; PAM type: YTN; PAM sequence: TTT
atgcccctgggcctgaggca

SEQ ID NO: 11739 - DNA, 20 bp, Artificial Sequence
  Description of Artificial Sequence: Synthetic oligonucleotide
  Target: APOC3; (-) strand; PAM type: YTN; PAM sequence: CTC
agatgtttatgcccctgggc

SEQ ID NO: 11740 - DNA, 20 bp, Artificial Sequence
  Description of Artificial Sequence: Synthetic oligonucleotide
  Target: APOC3; (-) strand; PAM type: YTN; PAM sequence: CTC
caggtcacctcagatgttta

SEQ ID NO: 11741 - DNA, 20 bp, Artificial Sequence
  Description of Artificial Sequence: Synthetic oligonucleotide
  Target: APOC3; (-) strand; PAM type: YTN; PAM sequence: CTG
ccatctccaggtcacctcag

SEQ ID NO: 11742 - DNA, 20 bp, Artificial Sequence
  Description of Artificial Sequence: Synthetic oligonucleotide
  Target: APOC3; (-) strand; PAM type: YTN; PAM sequence: TTG
caggaaccccagcacaagtc

SEQ ID NO: 11743 - DNA, 20 bp, Artificial Sequence
  Description of Artificial Sequence: Synthetic oligonucleotide
  Target: APOC3; (-) strand; PAM type: YTN; PAM sequence: CTT
gcaggaaccccagcacaagt

SEQ ID NO: 11744 - DNA, 20 bp, Artificial Sequence
  Description of Artificial Sequence: Synthetic oligonucleotide
  Target: APOC3; (-) strand; PAM type: YTN; PAM sequence: CTG
ggagaagagatatccttgca

SEQ ID NO: 11745 - DNA, 20 bp, Artificial Sequence
  Description of Artificial Sequence: Synthetic oligonucleotide
  Target: APOC3; (-) strand; PAM type: YTN; PAM sequence: CTG
ccaccctgggagaagagata

SEQ ID NO: 11746 - DNA, 20 bp, Artificial Sequence
  Description of Artificial Sequence: Synthetic oligonucleotide
  Target: APOC3; (-) strand; PAM type: YTN; PAM sequence: CTC
aggcaggaatcccccacagc

SEQ ID NO: 11747 - DNA, 20 bp, Artificial Sequence
  Description of Artificial Sequence: Synthetic oligonucleotide
  Target: APOC3; (-) strand; PAM type: YTN; PAM sequence: CTG
agacctcaggcaggaatccc

SEQ ID NO: 11748 - DNA, 20 bp, Artificial Sequence
  Description of Artificial Sequence: Synthetic oligonucleotide
  Target: APOC3; (-) strand; PAM type: YTN; PAM sequence: CTG
gacgacagccctgagacctc

SEQ ID NO: 11749 - DNA, 20 bp, Artificial Sequence
  Description of Artificial Sequence: Synthetic oligonucleotide
  Target: APOC3; (-) strand; PAM type: YTN; PAM sequence: TTC
actggacgacagccctgaga

SEQ ID NO: 11750 - DNA, 20 bp, Artificial Sequence
  Description of Artificial Sequence: Synthetic oligonucleotide
  Target: APOC3; (-) strand; PAM type: YTN; PAM sequence: CTT
cactggacgacagccctgag

SEQ ID NO: 11751 - DNA, 20 bp, Artificial Sequence
  Description of Artificial Sequence: Synthetic oligonucleotide
  Target: APOC3; (-) strand; PAM type: YTN; PAM sequence: CTC
aacttcactggacgacagcc

SEQ ID NO: 11752 - DNA, 20 bp, Artificial Sequence
  Description of Artificial Sequence: Synthetic oligonucleotide
  Target: APOC3; (-) strand; PAM type: YTN; PAM sequence: CTC
tcaacttcactggacgacag

SEQ ID NO: 11753 - DNA, 20 bp, Artificial Sequence
  Description of Artificial Sequence: Synthetic oligonucleotide
  Target: APOC3; (-) strand; PAM type: YTN; PAM sequence: CTG
gacgacaccagtcaggacca

SEQ ID NO: 11754 - DNA, 20 bp, Artificial Sequence
  Description of Artificial Sequence: Synthetic oligonucleotide
  Target: APOC3; (-) strand; PAM type: YTN; PAM sequence: CTG
taggcaaccatgggacccac

SEQ ID NO: 11755 - DNA, 20 bp, Artificial Sequence
  Description of Artificial Sequence: Synthetic oligonucleotide
  Target: APOC3; (-) strand; PAM type: YTN; PAM sequence: CTC
tgtaggcaaccatgggaccc

SEQ ID NO: 11756 - DNA, 20 bp, Artificial Sequence
  Description of Artificial Sequence: Synthetic oligonucleotide
  Target: APOC3; (-) strand; PAM type: YTN; PAM sequence: CTC
ctctgtaggcaaccatggga

SEQ ID NO: 11757 - DNA, 20 bp, Artificial Sequence
  Description of Artificial Sequence: Synthetic oligonucleotide
  Target: APOC3; (-) strand; PAM type: YTN; PAM sequence: CTA
aatcagtcaggggaagcaac

SEQ ID NO: 11758 - DNA, 20 bp, Artificial Sequence
  Description of Artificial Sequence: Synthetic oligonucleotide
  Target: APOC3; (-) strand; PAM type: YTN; PAM sequence: CTG
aagccatcggtcacccagcc

SEQ ID NO: 11759 - DNA, 20 bp, Artificial Sequence
  Description of Artificial Sequence: Synthetic oligonucleotide
  Target: APOC3; (-) strand; PAM type: YTN; PAM sequence: TTC
agggaactgaagccatcggt

SEQ ID NO: 11760 - DNA, 20 bp, Artificial Sequence
  Description of Artificial Sequence: Synthetic oligonucleotide
  Target: APOC3; (-) strand; PAM type: YTN; PAM sequence: TTT
cagggaactgaagccatcgg

SEQ ID NO: 11761 - DNA, 20 bp, Artificial Sequence
  Description of Artificial Sequence: Synthetic oligonucleotide
  Target: APOC3; (-) strand; PAM type: YTN; PAM sequence: CTT
tcagggaactgaagccatcg

SEQ ID NO: 11762 - DNA, 20 bp, Artificial Sequence
  Description of Artificial Sequence: Synthetic oligonucleotide
  Target: APOC3; (-) strand; PAM type: YTN; PAM sequence: CTC
cagtagtctttcagggaact

SEQ ID NO: 11763 - DNA, 20 bp, Artificial Sequence
  Description of Artificial Sequence: Synthetic oligonucleotide
  Target: APOC3; (-) strand; PAM type: YTN; PAM sequence: TTA
acggtgctccagtagtcttt

SEQ ID NO: 11764 - DNA, 20 bp, Artificial Sequence
  Description of Artificial Sequence: Synthetic oligonucleotide
  Target: APOC3; (-) strand; PAM type: YTN; PAM sequence: CTT
aacggtgctccagtagtctt

SEQ ID NO: 11765 - DNA, 20 bp, Artificial Sequence
  Description of Artificial Sequence: Synthetic oligonucleotide
  Target: APOC3; (-) strand; PAM type: YTN; PAM sequence: TTG
tccttaacggtgctccagta

SEQ ID NO: 11766 - DNA, 20 bp, Artificial Sequence
  Description of Artificial Sequence: Synthetic oligonucleotide
  Target: APOC3; (-) strand; PAM type: YTN; PAM sequence: CTT
gtccttaacggtgctccagt

SEQ ID NO: 11767 - DNA, 20 bp, Artificial Sequence
  Description of Artificial Sequence: Synthetic oligonucleotide
  Target: APOC3; (-) strand; PAM type: YTN; PAM sequence: CTC
agagaacttgtccttaacgg

SEQ ID NO: 11768 - DNA, 20 bp, Artificial Sequence
  Description of Artificial Sequence: Synthetic oligonucleotide
  Target: APOC3; (-) strand; PAM type: YTN; PAM sequence: CTC
agggtccaaatcccagaact

SEQ ID NO: 11769 - DNA, 20 bp, Artificial Sequence
  Description of Artificial Sequence: Synthetic oligonucleotide
  Target: APOC3; (-) strand; PAM type: YTN; PAM sequence: CTG
acctcagggtccaaatccca

SEQ ID NO: 11770 - DNA, 20 bp, Artificial Sequence
  Description of Artificial Sequence: Synthetic oligonucleotide
  Target: APOC3; (-) strand; PAM type: YTN; PAM sequence: TTG
gtctgacctcagggtccaaa

SEQ ID NO: 11771 - DNA, 20 bp, Artificial Sequence
  Description of Artificial Sequence: Synthetic oligonucleotide
  Target: APOC3; (-) strand; PAM type: YTN; PAM sequence: CTG
aagttggtctgacctcaggg

SEQ ID NO: 11772 - DNA, 20 bp, Artificial Sequence
  Description of Artificial Sequence: Synthetic oligonucleotide
  Target: APOC3; (-) strand; PAM type: YTN; PAM sequence: CTC
aggcagccacggctgaagtt

SEQ ID NO: 11773 - DNA, 20 bp, Artificial Sequence
  Description of Artificial Sequence: Synthetic oligonucleotide
  Target: APOC3; (-) strand; PAM type: YTN; PAM sequence: TTG
aggtctcaggcagccacggc

SEQ ID NO: 11774 - DNA, 20 bp, Artificial Sequence
  Description of Artificial Sequence: Synthetic oligonucleotide
  Target: APOC3; (-) strand; PAM type: YTN; PAM sequence: TTG
gggtattgaggtctcaggca

SEQ ID NO: 11775 - DNA, 20 bp, Artificial Sequence
  Description of Artificial Sequence: Synthetic oligonucleotide
  Target: APOC3; (-) strand; PAM type: YTN; PAM sequence: CTT
ggggtattgaggtctcaggc

SEQ ID NO: 11776 - DNA, 20 bp, Artificial Sequence
  Description of Artificial Sequence: Synthetic oligonucleotide
  Target: APOC3; (-) strand; PAM type: YTN; PAM sequence: CTC
gcaggatggataggcaggtg

SEQ ID NO: 11777 - DNA, 20 bp, Artificial Sequence
  Description of Artificial Sequence: Synthetic oligonucleotide
  Target: APOC3; (-) strand; PAM type: YTN; PAM sequence: TTG
caggacccaaggagctcgca

SEQ ID NO: 11778 - DNA, 20 bp, Artificial Sequence
  Description of Artificial Sequence: Synthetic oligonucleotide
  Target: APOC3; (-) strand; PAM type: YTN; PAM sequence: CTG
gagattgcaggacccaagga

SEQ ID NO: 11779 - DNA, 20 bp, Artificial Sequence
  Description of Artificial Sequence: Synthetic oligonucleotide
  Target: APOC3; (-) strand; PAM type: YTN; PAM sequence: CTA
caggggcagccctggagatt

SEQ ID NO: 11780 - DNA, 20 bp, Artificial Sequence
  Description of Artificial Sequence: Synthetic oligonucleotide
  Target: APOC3; (-) strand; PAM type: YTN; PAM sequence: TTA
agcaacctacaggggcagcc

SEQ ID NO: 11781 - DNA, 20 bp, Artificial Sequence
  Description of Artificial Sequence: Synthetic oligonucleotide
  Target: APOC3; (-) strand; PAM type: YTN; PAM sequence: TTT
aagcaacctacaggggcagc

SEQ ID NO: 11782 - DNA, 20 bp, Artificial Sequence
  Description of Artificial Sequence: Synthetic oligonucleotide
  Target: APOC3; (-) strand; PAM type: YTN; PAM sequence: TTT
taagcaacctacaggggcag

SEQ ID NO: 11783 - DNA, 20 bp, Artificial Sequence
  Description of Artificial Sequence: Synthetic oligonucleotide
  Target: APOC3; (-) strand; PAM type: YTN; PAM sequence: CTT
ttaagcaacctacaggggca

SEQ ID NO: 11784 - DNA, 20 bp, Artificial Sequence
  Description of Artificial Sequence: Synthetic oligonucleotide
  Target: APOC3; (-) strand; PAM type: YTN; PAM sequence: CTG
tcccttttaagcaacctaca

SEQ ID NO: 11785 - DNA, 20 bp, Artificial Sequence
  Description of Artificial Sequence: Synthetic oligonucleotide
  Target: APOC3; (-) strand; PAM type: YTN; PAM sequence: CTG
agaatactgtcccttttaag

SEQ ID NO: 11786 - DNA, 20 bp, Artificial Sequence
  Description of Artificial Sequence: Synthetic oligonucleotide
  Target: APOC3; (-) strand; PAM type: YTN; PAM sequence: CTG
gaggggggccaggcatgagg

SEQ ID NO: 11787 - DNA, 20 bp, Artificial Sequence
  Description of Artificial Sequence: Synthetic oligonucleotide
  Target: APOC3; (-) strand; PAM type: YTN; PAM sequence: TTG
ggaggccagcatgcctggag

SEQ ID NO: 11788 - DNA, 20 bp, Artificial Sequence
  Description of Artificial Sequence: Synthetic oligonucleotide
  Target: APOC3; (-) strand; PAM type: YTN; PAM sequence: TTA
ttgggaggccagcatgcctg

SEQ ID NO: 11789 - DNA, 20 bp, Artificial Sequence
  Description of Artificial Sequence: Synthetic oligonucleotide
  Target: APOC3; (-) strand; PAM type: YTN; PAM sequence: TTT
attgggaggccagcatgcct

SEQ ID NO: 11790 - DNA, 20 bp, Artificial Sequence
  Description of Artificial Sequence: Synthetic oligonucleotide
  Target: APOC3; (-) strand; PAM type: YTN; PAM sequence: CTT
tattgggaggccagcatgcc

SEQ ID NO: 11791 - DNA, 20 bp, Artificial Sequence
  Description of Artificial Sequence: Synthetic oligonucleotide
  Target: APOC3; (-) strand; PAM type: YTN; PAM sequence: TTG
tccagctttattgggaggcc

SEQ ID NO: 11792 - DNA, 20 bp, Artificial Sequence
  Description of Artificial Sequence: Synthetic oligonucleotide
  Target: APOC3; (-) strand; PAM type: YTN; PAM sequence: CTT
gtccagctttattgggaggc

SEQ ID NO: 11793 - DNA, 20 bp, Artificial Sequence
  Description of Artificial Sequence: Synthetic oligonucleotide
  Target: APOC3; (-) strand; PAM type: YTN; PAM sequence: TTC
ttgtccagctttattgggag

SEQ ID NO: 11794 - DNA, 20 bp, Artificial Sequence
  Description of Artificial Sequence: Synthetic oligonucleotide
  Target: APOC3; (-) strand; PAM type: YTN; PAM sequence: CTT
cttgtccagctttattggga

SEQ ID NO: 11795 - DNA, 20 bp, Artificial Sequence
  Description of Artificial Sequence: Synthetic oligonucleotide
  Target: APOC3; (-) strand; PAM type: YTN; PAM sequence: CTC
atagcagcttcttgtccagc

SEQ ID NO: 11796 - DNA, 20 bp, Artificial Sequence
  Description of Artificial Sequence: Synthetic oligonucleotide
  Target: APOC3; (-) strand; PAM type: YTN; PAM sequence: TTG
cgacggcccactcatagcag

SEQ ID NO: 11797 - DNA, 20 bp, Artificial Sequence
  Description of Artificial Sequence: Synthetic oligonucleotide
  Target: APOC3; (-) strand; PAM type: YTN; PAM sequence: CTT
gcgacggcccactcatagca

SEQ ID NO: 11798 - DNA, 20 bp, Artificial Sequence
  Description of Artificial Sequence: Synthetic oligonucleotide
  Target: APOC3; (-) strand; PAM type: YTN; PAM sequence: TTC
ccatgcccagacacagatgg

SEQ ID NO: 11799 - DNA, 20 bp, Artificial Sequence
  Description of Artificial Sequence: Synthetic oligonucleotide
  Target: APOC3; (-) strand; PAM type: YTN; PAM sequence: TTT
cccatgcccagacacagatg

SEQ ID NO: 11800 - DNA, 20 bp, Artificial Sequence
  Description of Artificial Sequence: Synthetic oligonucleotide
  Target: APOC3; (-) strand; PAM type: YTN; PAM sequence: CTT
tcccatgcccagacacagat

SEQ ID NO: 11801 - DNA, 20 bp, Artificial Sequence
  Description of Artificial Sequence: Synthetic oligonucleotide
  Target: APOC3; (-) strand; PAM type: YTN; PAM sequence: CTC
ggccctttcccatgcccaga

SEQ ID NO: 11802 - DNA, 20 bp, Artificial Sequence
  Description of Artificial Sequence: Synthetic oligonucleotide
  Target: APOC3; (-) strand; PAM type: YTN; PAM sequence: CTG
tccagtgcccacccacagaa

SEQ ID NO: 11803 - DNA, 20 bp, Artificial Sequence
  Description of Artificial Sequence: Synthetic oligonucleotide
  Target: APOC3; (-) strand; PAM type: YTN; PAM sequence: CTG
gagtctgtccagtgcccacc

SEQ ID NO: 11804 - DNA, 20 bp, Artificial Sequence
  Description of Artificial Sequence: Synthetic oligonucleotide
  Target: APOC3; (-) strand; PAM type: YTN; PAM sequence: CTG
acctggagtctgtccagtgc

SEQ ID NO: 11805 - DNA, 20 bp, Artificial Sequence
  Description of Artificial Sequence: Synthetic oligonucleotide
  Target: APOC3; (-) strand; PAM type: YTN; PAM sequence: CTG
cctgacctggagtctgtcca

SEQ ID NO: 11806 - DNA, 20 bp, Artificial Sequence
  Description of Artificial Sequence: Synthetic oligonucleotide
  Target: APOC3; (-) strand; PAM type: YTN; PAM sequence: CTC
catgcctgcctgacctggag

SEQ ID NO: 11807 - DNA, 20 bp, Artificial Sequence
  Description of Artificial Sequence: Synthetic oligonucleotide
  Target: APOC3; (-) strand; PAM type: YTN; PAM sequence: CTG
gcctccatgcctgcctgacc

SEQ ID NO: 11808 - DNA, 20 bp, Artificial Sequence
  Description of Artificial Sequence: Synthetic oligonucleotide
  Target: APOC3; (-) strand; PAM type: YTN; PAM sequence: CTA
ccagaaggtggatagagcgc

SEQ ID NO: 11809 - DNA, 20 bp, Artificial Sequence
  Description of Artificial Sequence: Synthetic oligonucleotide
  Target: APOC3; (-) strand; PAM type: YTN; PAM sequence: CTG
cccagctaccagaaggtgga

SEQ ID NO: 11810 - DNA, 20 bp, Artificial Sequence
  Description of Artificial Sequence: Synthetic oligonucleotide
  Target: APOC3; (-) strand; PAM type: YTN; PAM sequence: CTG
aggcccagagactgcccagc

SEQ ID NO: 11811 - DNA, 20 bp, Artificial Sequence
  Description of Artificial Sequence: Synthetic oligonucleotide
  Target: APOC3; (-) strand; PAM type: YTN; PAM sequence: TTA
gagatgaagaaactgaggcc

SEQ ID NO: 11812 - DNA, 20 bp, Artificial Sequence
  Description of Artificial Sequence: Synthetic oligonucleotide
  Target: APOC3; (-) strand; PAM type: YTN; PAM sequence: CTT
agagatgaagaaactgaggc

SEQ ID NO: 11813 - DNA, 20 bp, Artificial Sequence
  Description of Artificial Sequence: Synthetic oligonucleotide
  Target: APOC3; (-) strand; PAM type: YTN; PAM sequence: CTA
ccttagagatgaagaaactg

SEQ ID NO: 11814 - DNA, 20 bp, Artificial Sequence
  Description of Artificial Sequence: Synthetic oligonucleotide
  Target: APOC3; (-) strand; PAM type: YTN; PAM sequence: TTC
ctaccttagagatgaagaaa

SEQ ID NO: 11815 - DNA, 20 bp, Artificial Sequence
  Description of Artificial Sequence: Synthetic oligonucleotide
  Target: APOC3; (-) strand; PAM type: YTN; PAM sequence: CTG
tcaaggaaggcagggtacgg

SEQ ID NO: 11816 - DNA, 20 bp, Artificial Sequence
  Description of Artificial Sequence: Synthetic oligonucleotide
  Target: APOC3; (-) strand; PAM type: YTN; PAM sequence: TTC
cgcacaaagctgtcaaggaa

SEQ ID NO: 11817 - DNA, 20 bp, Artificial Sequence
  Description of Artificial Sequence: Synthetic oligonucleotide
  Target: APOC3; (-) strand; PAM type: YTN; PAM sequence: CTT
ccgcacaaagctgtcaagga

SEQ ID NO: 11818 - DNA, 20 bp, Artificial Sequence
  Description of Artificial Sequence: Synthetic oligonucleotide
  Target: APOC3; (-) strand; PAM type: YTN; PAM sequence: TTG
accttccgcacaaagctgtc

SEQ ID NO: 11819 - DNA, 20 bp, Artificial Sequence
  Description of Artificial Sequence: Synthetic oligonucleotide
  Target: APOC3; (-) strand; PAM type: YTN; PAM sequence: TTT
gaccttccgcacaaagctgt

SEQ ID NO: 11820 - DNA, 20 bp, Artificial Sequence
  Description of Artificial Sequence: Synthetic oligonucleotide
  Target: APOC3; (-) strand; PAM type: YTN; PAM sequence: CTG
tttgaccttccgcacaaagc

SEQ ID NO: 11821 - DNA, 20 bp, Artificial Sequence
  Description of Artificial Sequence: Synthetic oligonucleotide
  Target: APOC3; (-) strand; PAM type: YTN; PAM sequence: TTG
tcctgtttgaccttccgcac

SEQ ID NO: 11822 - DNA, 20 bp, Artificial Sequence
  Description of Artificial Sequence: Synthetic oligonucleotide
  Target: APOC3; (-) strand; PAM type: YTN; PAM sequence: TTA
ttgtcctgtttgaccttccg

SEQ ID NO: 11823 - DNA, 20 bp, Artificial Sequence
  Description of Artificial Sequence: Synthetic oligonucleotide
  Target: APOC3; (-) strand; PAM type: YTN; PAM sequence: CTT
attgtcctgtttgaccttcc

SEQ ID NO: 11824 - DNA, 20 bp, Artificial Sequence
  Description of Artificial Sequence: Synthetic oligonucleotide
  Target: APOC3; (-) strand; PAM type: YTN; PAM sequence: TTA
tcaaagtatcagcaaactta

SEQ ID NO: 11825 - DNA, 20 bp, Artificial Sequence
  Description of Artificial Sequence: Synthetic oligonucleotide
  Target: APOC3; (-) strand; PAM type: YTN; PAM sequence: TTT
atcaaagtatcagcaaactt

SEQ ID NO: 11826 - DNA, 20 bp, Artificial Sequence
  Description of Artificial Sequence: Synthetic oligonucleotide
  Target: APOC3; (-) strand; PAM type: YTN; PAM sequence: CTA
acagtttatcaaagtatcag

SEQ ID NO: 11827 - DNA, 20 bp, Artificial Sequence
  Description of Artificial Sequence: Synthetic oligonucleotide
  Target: APOC3; (-) strand; PAM type: YTN; PAM sequence: TTG
tgcagcacctaacagtttat

SEQ ID NO: 11828 - DNA, 20 bp, Artificial Sequence
  Description of Artificial Sequence: Synthetic oligonucleotide
  Target: APOC3; (-) strand; PAM type: YTN; PAM sequence: CTC
aagtcatgttgtgcagcacc

SEQ ID NO: 11829 - DNA, 20 bp, Artificial Sequence
  Description of Artificial Sequence: Synthetic oligonucleotide
  Target: APOC3; (-) strand; PAM type: YTN; PAM sequence: CTG
gcatggggcacacactcaag

SEQ ID NO: 11830 - DNA, 20 bp, Artificial Sequence
  Description of Artificial Sequence: Synthetic oligonucleotide
  Target: APOC3; (-) strand; PAM type: YTN; PAM sequence: TTA
agtgccaggcatagtggctg

SEQ ID NO: 11831 - DNA, 20 bp, Artificial Sequence
  Description of Artificial Sequence: Synthetic oligonucleotide
  Target: APOC3; (-) strand; PAM type: YTN; PAM sequence: CTT
aagtgccaggcatagtggct

SEQ ID NO: 11832 - DNA, 20 bp, Artificial Sequence
  Description of Artificial Sequence: Synthetic oligonucleotide
  Target: APOC3; (-) strand; PAM type: YTN; PAM sequence: CTG
atgacaacttaagtgccagg

SEQ ID NO: 11833 - DNA, 20 bp, Artificial Sequence
  Description of Artificial Sequence: Synthetic oligonucleotide
  Target: APOC3; (-) strand; PAM type: YTN; PAM sequence: CTC
tgatgacaacttaagtgcca

SEQ ID NO: 11834 - DNA, 20 bp, Artificial Sequence
  Description of Artificial Sequence: Synthetic oligonucleotide
  Target: APOC3; (-) strand; PAM type: YTN; PAM sequence: CTC
aactctgatgacaacttaag

SEQ ID NO: 11835 - DNA, 20 bp, Artificial Sequence
  Description of Artificial Sequence: Synthetic oligonucleotide
  Target: APOC3; (-) strand; PAM type: YTN; PAM sequence: TTG
agtaaacacacacagtctca

SEQ ID NO: 11836 - DNA, 20 bp, Artificial Sequence
  Description of Artificial Sequence: Synthetic oligonucleotide
  Target: APOC3; (-) strand; PAM type: YTN; PAM sequence: TTT
gagtaaacacacacagtctc

SEQ ID NO: 11837 - DNA, 20 bp, Artificial Sequence
  Description of Artificial Sequence: Synthetic oligonucleotide
  Target: APOC3; (-) strand; PAM type: YTN; PAM sequence: TTT
tgagtaaacacacacagtct

SEQ ID NO: 11838 - DNA, 20 bp, Artificial Sequence
  Description of Artificial Sequence: Synthetic oligonucleotide
  Target: APOC3; (-) strand; PAM type: YTN; PAM sequence: CTC
cacagttttgagtaaacaca

SEQ ID NO: 11839 - DNA, 20 bp, Artificial Sequence
  Description of Artificial Sequence: Synthetic oligonucleotide
  Target: APOC3; (-) strand; PAM type: YTN; PAM sequence: CTG
gataggggaggtcagctcca

SEQ ID NO: 11840 - DNA, 20 bp, Artificial Sequence
  Description of Artificial Sequence: Synthetic oligonucleotide
  Target: APOC3; (-) strand; PAM type: YTN; PAM sequence: CTA
gggggcctggataggggagg

SEQ ID NO: 11841 - DNA, 20 bp, Artificial Sequence
  Description of Artificial Sequence: Synthetic oligonucleotide
  Target: APOC3; (-) strand; PAM type: YTN; PAM sequence: CTA
agagggctagggggcctgga

SEQ ID NO: 11842 - DNA, 20 bp, Artificial Sequence
  Description of Artificial Sequence: Synthetic oligonucleotide
  Target: APOC3; (-) strand; PAM type: YTN; PAM sequence: TTC
acgtgcgcctaagagggcta

SEQ ID NO: 11843 - DNA, 20 bp, Artificial Sequence
  Description of Artificial Sequence: Synthetic oligonucleotide
  Target: APOC3; (-) strand; PAM type: YTN; PAM sequence: CTT
cacgtgcgcctaagagggct

SEQ ID NO: 11844 - DNA, 20 bp, Artificial Sequence
  Description of Artificial Sequence: Synthetic oligonucleotide
  Target: APOC3; (-) strand; PAM type: YTN; PAM sequence: CTC
ccttcacgtgcgcctaagag

SEQ ID NO: 11845 - DNA, 20 bp, Artificial Sequence
  Description of Artificial Sequence: Synthetic oligonucleotide
  Target: APOC3; (-) strand; PAM type: YTN; PAM sequence: CTC
ctcccttcacgtgcgcctaa

SEQ ID NO: 11846 - DNA, 20 bp, Artificial Sequence
  Description of Artificial Sequence: Synthetic oligonucleotide
  Target: APOC3; (-) strand; PAM type: YTN; PAM sequence: CTA
gcccatccggcctcctccct

SEQ ID NO: 11847 - DNA, 20 bp, Artificial Sequence
  Description of Artificial Sequence: Synthetic oligonucleotide
  Target: APOC3; (-) strand; PAM type: YTN; PAM sequence: CTC
tagcccatccggcctcctcc

SEQ ID NO: 11848 - DNA, 20 bp, Artificial Sequence
  Description of Artificial Sequence: Synthetic oligonucleotide
  Target: APOC3; (-) strand; PAM type: YTN; PAM sequence: CTC
caacctctagcccatccggc

SEQ ID NO: 11849 - DNA, 20 bp, Artificial Sequence
  Description of Artificial Sequence: Synthetic oligonucleotide
  Target: APOC3; (-) strand; PAM type: YTN; PAM sequence: TTA
ctccaacctctagcccatcc

SEQ ID NO: 11850 - DNA, 20 bp, Artificial Sequence
  Description of Artificial Sequence: Synthetic oligonucleotide
  Target: APOC3; (-) strand; PAM type: YTN; PAM sequence: CTT
actccaacctctagcccatc

SEQ ID NO: 11851 - DNA, 20 bp, Artificial Sequence
  Description of Artificial Sequence: Synthetic oligonucleotide
  Target: APOC3; (-) strand; PAM type: YTN; PAM sequence: TTG
catcttactccaacctctag

SEQ ID NO: 11852 - DNA, 20 bp, Artificial Sequence
  Description of Artificial Sequence: Synthetic oligonucleotide
  Target: APOC3; (-) strand; PAM type: YTN; PAM sequence: CTC
gttgcatcttactccaacct

SEQ ID NO: 11853 - DNA, 20 bp, Artificial Sequence
  Description of Artificial Sequence: Synthetic oligonucleotide
  Target: APOC3; (-) strand; PAM type: YTN; PAM sequence: CTG
atatcaagtggtggagccaa

SEQ ID NO: 11854 - DNA, 20 bp, Artificial Sequence
  Description of Artificial Sequence: Synthetic oligonucleotide
  Target: APOC3; (-) strand; PAM type: YTN; PAM sequence: CTG
aggctgatatcaagtggtgg

SEQ ID NO: 11855 - DNA, 20 bp, Artificial Sequence
  Description of Artificial Sequence: Synthetic oligonucleotide
  Target: APOC3; (-) strand; PAM type: YTN; PAM sequence: TTA
catgtaagaaactgaggctg

SEQ ID NO: 11856 - DNA, 20 bp, Artificial Sequence
  Description of Artificial Sequence: Synthetic oligonucleotide
  Target: APOC3; (-) strand; PAM type: YTN; PAM sequence: TTT
acatgtaagaaactgaggct

SEQ ID NO: 11857 - DNA, 20 bp, Artificial Sequence
  Description of Artificial Sequence: Synthetic oligonucleotide
  Target: APOC3; (-) strand; PAM type: YTN; PAM sequence: CTT
tacatgtaagaaactgaggc

SEQ ID NO: 11858 - DNA, 20 bp, Artificial Sequence
  Description of Artificial Sequence: Synthetic oligonucleotide
  Target: APOC3; (-) strand; PAM type: YTN; PAM sequence: TTG
tatccactttacatgtaaga

SEQ ID NO: 11859 - DNA, 20 bp, Artificial Sequence
  Description of Artificial Sequence: Synthetic oligonucleotide
  Target: APOC3; (-) strand; PAM type: YTN; PAM sequence: CTA
cggtggagggggtacggttg

SEQ ID NO: 11860 - DNA, 20 bp, Artificial Sequence
  Description of Artificial Sequence: Synthetic oligonucleotide
  Target: APOC3; (-) strand; PAM type: YTN; PAM sequence: CTC
acggcaaacctacggtggag

SEQ ID NO: 11861 - DNA, 20 bp, Artificial Sequence
  Description of Artificial Sequence: Synthetic oligonucleotide
  Target: APOC3; (-) strand; PAM type: YTN; PAM sequence: TTC
aatctcacggcaaacctacg

SEQ ID NO: 11862 - DNA, 20 bp, Artificial Sequence
  Description of Artificial Sequence: Synthetic oligonucleotide
  Target: APOC3; (-) strand; PAM type: YTN; PAM sequence: TTT
caatctcacggcaaacctac

SEQ ID NO: 11863 - DNA, 20 bp, Artificial Sequence
  Description of Artificial Sequence: Synthetic oligonucleotide
  Target: APOC3; (-) strand; PAM type: YTN; PAM sequence: CTC
atttcaatctcacggcaaac

SEQ ID NO: 11864 - DNA, 20 bp, Artificial Sequence
  Description of Artificial Sequence: Synthetic oligonucleotide
  Target: APOC3; (-) strand; PAM type: YTN; PAM sequence: CTC
tcatttcaatctcacggcaa

SEQ ID NO: 11865 - DNA, 20 bp, Artificial Sequence
  Description of Artificial Sequence: Synthetic oligonucleotide
  Target: APOC3; (-) strand; PAM type: YTN; PAM sequence: CTC
tctcatttcaatctcacggc

SEQ ID NO: 11866 - DNA, 20 bp, Artificial Sequence
  Description of Artificial Sequence: Synthetic oligonucleotide
  Target: APOC3; (-) strand; PAM type: YTN; PAM sequence: TTC
gaacgctctctcatttcaat

SEQ ID NO: 11867 - DNA, 20 bp, Artificial Sequence
  Description of Artificial Sequence: Synthetic oligonucleotide
  Target: APOC3; (-) strand; PAM type: YTN; PAM sequence: CTG
tgccaaacggttcgaacgct

SEQ ID NO: 11868 - DNA, 20 bp, Artificial Sequence
  Description of Artificial Sequence: Synthetic oligonucleotide
  Target: APOC3; (-) strand; PAM type: YTN; PAM sequence: TTA
cgtgcaggtgctgtgccaaa

SEQ ID NO: 11869 - DNA, 20 bp, Artificial Sequence
  Description of Artificial Sequence: Synthetic oligonucleotide
  Target: APOC3; (-) strand; PAM type: YTN; PAM sequence: TTT
acgtgcaggtgctgtgccaa

SEQ ID NO: 11870 - DNA, 20 bp, Artificial Sequence
  Description of Artificial Sequence: Synthetic oligonucleotide
  Target: APOC3; (-) strand; PAM type: YTN; PAM sequence: CTT
tacgtgcaggtgctgtgcca

SEQ ID NO: 11871 - DNA, 20 bp, Artificial Sequence
  Description of Artificial Sequence: Synthetic oligonucleotide
  Target: APOC3; (-) strand; PAM type: YTN; PAM sequence: TTG
atcaagcatctttacgtgca

SEQ ID NO: 11872 - DNA, 20 bp, Artificial Sequence
  Description of Artificial Sequence: Synthetic oligonucleotide
  Target: APOC3; (-) strand; PAM type: YTN; PAM sequence: CTG
taatcatgacaacattgatc

SEQ ID NO: 11873 - DNA, 20 bp, Artificial Sequence
  Description of Artificial Sequence: Synthetic oligonucleotide
  Target: APOC3; (-) strand; PAM type: YTN; PAM sequence: CTC
aactgtaatcatgacaacat

SEQ ID NO: 11874 - DNA, 20 bp, Artificial Sequence
  Description of Artificial Sequence: Synthetic oligonucleotide
  Target: APOC3; (-) strand; PAM type: YTN; PAM sequence: CTC
cagtccgggtcccaagggcc

SEQ ID NO: 11875 - DNA, 20 bp, Artificial Sequence
  Description of Artificial Sequence: Synthetic oligonucleotide
  Target: APOC3; (-) strand; PAM type: YTN; PAM sequence: CTG
ccccccaccactccagtccg

SEQ ID NO: 11876 - DNA, 20 bp, Artificial Sequence
  Description of Artificial Sequence: Synthetic oligonucleotide
  Target: APOC3; (-) strand; PAM type: YTN; PAM sequence: TTG
gtcccaggacactgcccccc

SEQ ID NO: 11877 - DNA, 20 bp, Artificial Sequence
  Description of Artificial Sequence: Synthetic oligonucleotide
  Target: APOC3; (-) strand; PAM type: YTN; PAM sequence: TTT
ggtcccaggacactgccccc

SEQ ID NO: 11878 - DNA, 20 bp, Artificial Sequence
  Description of Artificial Sequence: Synthetic oligonucleotide
  Target: APOC3; (-) strand; PAM type: YTN; PAM sequence: TTT
tggtcccaggacactgcccc

SEQ ID NO: 11879 - DNA, 20 bp, Artificial Sequence
  Description of Artificial Sequence: Synthetic oligonucleotide
  Target: APOC3; (-) strand; PAM type: YTN; PAM sequence: TTT
ttggtcccaggacactgccc

SEQ ID NO: 11880 - DNA, 20 bp, Artificial Sequence
  Description of Artificial Sequence: Synthetic oligonucleotide
  Target: APOC3; (-) strand; PAM type: YTN; PAM sequence: CTT
tttggtcccaggacactgcc

SEQ ID NO: 11881 - DNA, 20 bp, Artificial Sequence
  Description of Artificial Sequence: Synthetic oligonucleotide
  Target: APOC3; (-) strand; PAM type: YTN; PAM sequence: TTC
tttttggtcccaggacactg

SEQ ID NO: 11882 - DNA, 20 bp, Artificial Sequence
  Description of Artificial Sequence: Synthetic oligonucleotide
  Target: APOC3; (-) strand; PAM type: YTN; PAM sequence: CTT
ctttttggtcccaggacact

SEQ ID NO: 11883 - DNA, 20 bp, Artificial Sequence
  Description of Artificial Sequence: Synthetic oligonucleotide
  Target: APOC3; (-) strand; PAM type: YTN; PAM sequence: TTG
tgcttctttttggtcccagg

SEQ ID NO: 11884 - DNA, 20 bp, Artificial Sequence
  Description of Artificial Sequence: Synthetic oligonucleotide
  Target: APOC3; (-) strand; PAM type: YTN; PAM sequence: CTT
gtgcttctttttggtcccag

SEQ ID NO: 11885 - DNA, 20 bp, Artificial Sequence
  Description of Artificial Sequence: Synthetic oligonucleotide
  Target: APOC3; (-) strand; PAM type: YTN; PAM sequence: TTG
ggagaccttgtgcttctttt

SEQ ID NO: 11886 - DNA, 20 bp, Artificial Sequence
  Description of Artificial Sequence: Synthetic oligonucleotide
  Target: APOC3; (-) strand; PAM type: YTN; PAM sequence: CTA
ttgggagaccttgtgcttct

SEQ ID NO: 11887 - DNA, 20 bp, Artificial Sequence
  Description of Artificial Sequence: Synthetic oligonucleotide
  Target: APOC3; (-) strand; PAM type: YTN; PAM sequence: CTC
tattgggagaccttgtgctt

SEQ ID NO: 11888 - DNA, 20 bp, Artificial Sequence
  Description of Artificial Sequence: Synthetic oligonucleotide
  Target: APOC3; (-) strand; PAM type: YTN; PAM sequence: TTC
gggtggtggggacacaaagg

SEQ ID NO: 11889 - DNA, 20 bp, Artificial Sequence
  Description of Artificial Sequence: Synthetic oligonucleotide
  Target: APOC3; (-) strand; PAM type: YTN; PAM sequence: TTT
cgggtggtggggacacaaag

SEQ ID NO: 11890 - DNA, 20 bp, Artificial Sequence
  Description of Artificial Sequence: Synthetic oligonucleotide
  Target: APOC3; (-) strand; PAM type: YTN; PAM sequence: CTT
tcgggtggtggggacacaaa

SEQ ID NO: 11891 - DNA, 20 bp, Artificial Sequence
  Description of Artificial Sequence: Synthetic oligonucleotide
  Target: APOC3; (-) strand; PAM type: YTN; PAM sequence: CTG
acatctttcgggtggtgggg

SEQ ID NO: 11892 - DNA, 20 bp, Artificial Sequence
  Description of Artificial Sequence: Synthetic oligonucleotide
  Target: APOC3; (-) strand; PAM type: YTN; PAM sequence: CTG
acctgacatctttcgggtgg

SEQ ID NO: 11893 - DNA, 20 bp, Artificial Sequence
  Description of Artificial Sequence: Synthetic oligonucleotide
  Target: APOC3; (-) strand; PAM type: YTN; PAM sequence: CTC
tgacctgacatctttcgggt

SEQ ID NO: 11894 - DNA, 20 bp, Artificial Sequence
  Description of Artificial Sequence: Synthetic oligonucleotide
  Target: APOC3; (-) strand; PAM type: YTN; PAM sequence: CTC
tctgacctgacatctttcgg

SEQ ID NO: 11895 - DNA, 20 bp, Artificial Sequence
  Description of Artificial Sequence: Synthetic oligonucleotide
  Target: APOC3; (-) strand; PAM type: YTN; PAM sequence: CTC
gggctctctgacctgacatc

SEQ ID NO: 11896 - DNA, 20 bp, Artificial Sequence
  Description of Artificial Sequence: Synthetic oligonucleotide
  Target: APOC3; (-) strand; PAM type: YTN; PAM sequence: CTC
tcgggctctctgacctgaca

SEQ ID NO: 11897 - DNA, 20 bp, Artificial Sequence
  Description of Artificial Sequence: Synthetic oligonucleotide
  Target: APOC3; (-) strand; PAM type: YTN; PAM sequence: CTG
cagctctcgggctctctgac

SEQ ID NO: 11898 - DNA, 20 bp, Artificial Sequence
  Description of Artificial Sequence: Synthetic oligonucleotide
  Target: APOC3; (-) strand; PAM type: YTN; PAM sequence: CTC
aagccatctgcagctctcgg

SEQ ID NO: 11899 - DNA, 20 bp, Artificial Sequence
  Description of Artificial Sequence: Synthetic oligonucleotide
  Target: APOC3; (-) strand; PAM type: YTN; PAM sequence: CTA
ctcaagccatctgcagctct

SEQ ID NO: 11900 - DNA, 20 bp, Artificial Sequence
  Description of Artificial Sequence: Synthetic oligonucleotide
  Target: APOC3; (-) strand; PAM type: YTN; PAM sequence: CTG
aagagtggagccctactcaa

SEQ ID NO: 11901 - DNA, 20 bp, Artificial Sequence
  Description of Artificial Sequence: Synthetic oligonucleotide
  Target: APOC3; (-) strand; PAM type: YTN; PAM sequence: TTG
atctgaagagtggagcccta

SEQ ID NO: 11902 - DNA, 20 bp, Artificial Sequence
  Description of Artificial Sequence: Synthetic oligonucleotide
  Target: APOC3; (-) strand; PAM type: YTN; PAM sequence: TTT
gatctgaagagtggagccct

SEQ ID NO: 11903 - DNA, 20 bp, Artificial Sequence
  Description of Artificial Sequence: Synthetic oligonucleotide
  Target: APOC3; (-) strand; PAM type: YTN; PAM sequence: TTT
tgatctgaagagtggagccc

SEQ ID NO: 11904 - DNA, 20 bp, Artificial Sequence
  Description of Artificial Sequence: Synthetic oligonucleotide
  Target: APOC3; (-) strand; PAM type: YTN; PAM sequence: TTT
ttgatctgaagagtggagcc

SEQ ID NO: 11905 - DNA, 20 bp, Artificial Sequence
  Description of Artificial Sequence: Synthetic oligonucleotide
  Target: APOC3; (-) strand; PAM type: YTN; PAM sequence: TTT
tttgatctgaagagtggagc

SEQ ID NO: 11906 - DNA, 20 bp, Artificial Sequence
  Description of Artificial Sequence: Synthetic oligonucleotide
  Target: APOC3; (-) strand; PAM type: YTN; PAM sequence: CTC
cgggccacagttttttgatc

SEQ ID NO: 11907 - DNA, 20 bp, Artificial Sequence
  Description of Artificial Sequence: Synthetic oligonucleotide
  Target: APOC3; (-) strand; PAM type: YTN; PAM sequence: CTC
tccgggccacagttttttga

SEQ ID NO: 11908 - DNA, 20 bp, Artificial Sequence
  Description of Artificial Sequence: Synthetic oligonucleotide
  Target: APOC3; (-) strand; PAM type: YTN; PAM sequence: TTC
gcctctccgggccacagttt

SEQ ID NO: 11909 - DNA, 20 bp, Artificial Sequence
  Description of Artificial Sequence: Synthetic oligonucleotide
  Target: APOC3; (-) strand; PAM type: YTN; PAM sequence: CTT
cgcctctccgggccacagtt

SEQ ID NO: 11910 - DNA, 20 bp, Artificial Sequence
  Description of Artificial Sequence: Synthetic oligonucleotide
  Target: APOC3; (-) strand; PAM type: YTN; PAM sequence: CTG
gccaagtgccttcgcctctc

SEQ ID NO: 11911 - DNA, 20 bp, Artificial Sequence
  Description of Artificial Sequence: Synthetic oligonucleotide
  Target: APOC3; (-) strand; PAM type: YTN; PAM sequence: CTG
tgatgctggccaagtgcctt

SEQ ID NO: 11912 - DNA, 20 bp, Artificial Sequence
  Description of Artificial Sequence: Synthetic oligonucleotide
  Target: APOC3; (-) strand; PAM type: YTN; PAM sequence: CTC
tgtgatgctggccaagtgcc

SEQ ID NO: 11913 - DNA, 20 bp, Artificial Sequence
  Description of Artificial Sequence: Synthetic oligonucleotide
  Target: APOC3; (-) strand; PAM type: YTN; PAM sequence: CTG
gctctgtgatgctggccaag

SEQ ID NO: 11914 - DNA, 20 bp, Artificial Sequence
  Description of Artificial Sequence: Synthetic oligonucleotide
  Target: APOC3; (-) strand; PAM type: YTN; PAM sequence: CTG
ccacgtgctggctctgtgat

SEQ ID NO: 11915 - DNA, 20 bp, Artificial Sequence
  Description of Artificial Sequence: Synthetic oligonucleotide
  Target: APOC3; (-) strand; PAM type: YTN; PAM sequence: CTG
gccctgccacgtgctggctc

SEQ ID NO: 11916 - DNA, 20 bp, Artificial Sequence
  Description of Artificial Sequence: Synthetic oligonucleotide
  Target: APOC3; (-) strand; PAM type: YTN; PAM sequence: CTC
aaggtctggccctgccacgt

SEQ ID NO: 11917 - DNA, 20 bp, Artificial Sequence
  Description of Artificial Sequence: Synthetic oligonucleotide
  Target: APOC3; (-) strand; PAM type: YTN; PAM sequence: CTG
ggctcaaggtctggccctgc

SEQ ID NO: 11918 - DNA, 20 bp, Artificial Sequence
  Description of Artificial Sequence: Synthetic oligonucleotide
  Target: APOC3; (-) strand; PAM type: YTN; PAM sequence: CTG
acctgggctcaaggtctggc

SEQ ID NO: 11919 - DNA, 20 bp, Artificial Sequence
  Description of Artificial Sequence: Synthetic oligonucleotide
  Target: APOC3; (-) strand; PAM type: YTN; PAM sequence: CTG
agcagaatacacgcagctga

SEQ ID NO: 11920 - DNA, 20 bp, Artificial Sequence
  Description of Artificial Sequence: Synthetic oligonucleotide
  Target: APOC3; (-) strand; PAM type: YTN; PAM sequence: CTG
caccaactgagcagaataca

SEQ ID NO: 11921 - DNA, 20 bp, Artificial Sequence
  Description of Artificial Sequence: Synthetic oligonucleotide
  Target: APOC3; (-) strand; PAM type: YTN; PAM sequence: TTC
tgcaccaactgagcagaata

SEQ ID NO: 11922 - DNA, 20 bp, Artificial Sequence
  Description of Artificial Sequence: Synthetic oligonucleotide
  Target: APOC3; (-) strand; PAM type: YTN; PAM sequence: TTT
ctgcaccaactgagcagaat

SEQ ID NO: 11923 - DNA, 20 bp, Artificial Sequence
  Description of Artificial Sequence: Synthetic oligonucleotide
  Target: APOC3; (-) strand; PAM type: YTN; PAM sequence: TTT
tctgcaccaactgagcagaa

SEQ ID NO: 11924 - DNA, 20 bp, Artificial Sequence
  Description of Artificial Sequence: Synthetic oligonucleotide
  Target: APOC3; (-) strand; PAM type: YTN; PAM sequence: CTG
ttttctgcaccaactgagca

SEQ ID NO: 11925 - DNA, 20 bp, Artificial Sequence
  Description of Artificial Sequence: Synthetic oligonucleotide
  Target: APOC3; (-) strand; PAM type: YTN; PAM sequence: CTG
acataggagtgacaaaactg

SEQ ID NO: 11926 - DNA, 20 bp, Artificial Sequence
  Description of Artificial Sequence: Synthetic oligonucleotide
  Target: APOC3; (-) strand; PAM type: YTN; PAM sequence: CTA
acacctgacataggagtgac

SEQ ID NO: 11927 - DNA, 20 bp, Artificial Sequence
  Description of Artificial Sequence: Synthetic oligonucleotide
  Target: APOC3; (-) strand; PAM type: YTN; PAM sequence: CTG
taaaggagtccctaacacct

SEQ ID NO: 11928 - DNA, 20 bp, Artificial Sequence
  Description of Artificial Sequence: Synthetic oligonucleotide
  Target: APOC3; (-) strand; PAM type: YTN; PAM sequence: CTG
agatctgtaaaggagtccct

SEQ ID NO: 11929 - DNA, 20 bp, Artificial Sequence
  Description of Artificial Sequence: Synthetic oligonucleotide
  Target: APOC3; (-) strand; PAM type: YTN; PAM sequence: CTG
atgccactgagatctgtaaa

SEQ ID NO: 11930 - DNA, 20 bp, Artificial Sequence
  Description of Artificial Sequence: Synthetic oligonucleotide
  Target: APOC3; (-) strand; PAM type: YTN; PAM sequence: CTG
gatgtactgatgccactgag

SEQ ID NO: 11931 - DNA, 20 bp, Artificial Sequence
  Description of Artificial Sequence: Synthetic oligonucleotide
  Target: APOC3; (-) strand; PAM type: YTN; PAM sequence: CTC
caggtggggctggatgtact

SEQ ID NO: 11932 - DNA, 20 bp, Artificial Sequence
  Description of Artificial Sequence: Synthetic oligonucleotide
  Target: APOC3; (-) strand; PAM type: YTN; PAM sequence: TTC
agagagaaagcagtctccag

SEQ ID NO: 11933 - DNA, 20 bp, Artificial Sequence
  Description of Artificial Sequence: Synthetic oligonucleotide
  Target: APOC3; (-) strand; PAM type: YTN; PAM sequence: TTT
cagagagaaagcagtctcca

SEQ ID NO: 11934 - DNA, 20 bp, Artificial Sequence
  Description of Artificial Sequence: Synthetic oligonucleotide
  Target: APOC3; (-) strand; PAM type: YTN; PAM sequence: TTT
tcagagagaaagcagtctcc

SEQ ID NO: 11935 - DNA, 20 bp, Artificial Sequence
  Description of Artificial Sequence: Synthetic oligonucleotide
  Target: APOC3; (-) strand; PAM type: YTN; PAM sequence: CTG
gggaattttcagagagaaag

SEQ ID NO: 11936 - DNA, 20 bp, Artificial Sequence
  Description of Artificial Sequence: Synthetic oligonucleotide
  Target: APOC3; (-) strand; PAM type: YTN; PAM sequence: CTC
agcccagagagaagccctgg

SEQ ID NO: 11937 - DNA, 20 bp, Artificial Sequence
  Description of Artificial Sequence: Synthetic oligonucleotide
  Target: APOC3; (-) strand; PAM type: YTN; PAM sequence: CTC
tcagcccagagagaagccct

SEQ ID NO: 11938 - DNA, 20 bp, Artificial Sequence
  Description of Artificial Sequence: Synthetic oligonucleotide
  Target: APOC3; (-) strand; PAM type: YTN; PAM sequence: CTG
agatctctcagcccagagag

SEQ ID NO: 11939 - DNA, 20 bp, Artificial Sequence
  Description of Artificial Sequence: Synthetic oligonucleotide
  Target: APOC3; (-) strand; PAM type: YTN; PAM sequence: CTA
gatacgggtgctgagatctc

SEQ ID NO: 11940 - DNA, 20 bp, Artificial Sequence
  Description of Artificial Sequence: Synthetic oligonucleotide
  Target: APOC3; (-) strand; PAM type: YTN; PAM sequence: TTC
tagatacgggtgctgagatc

SEQ ID NO: 11941 - DNA, 20 bp, Artificial Sequence
  Description of Artificial Sequence: Synthetic oligonucleotide
  Target: APOC3; (-) strand; PAM type: YTN; PAM sequence: TTT
ctagatacgggtgctgagat

SEQ ID NO: 11942 - DNA, 20 bp, Artificial Sequence
  Description of Artificial Sequence: Synthetic oligonucleotide
  Target: APOC3; (-) strand; PAM type: YTN; PAM sequence: TTT
tctagatacgggtgctgaga

SEQ ID NO: 11943 - DNA, 20 bp, Artificial Sequence
  Description of Artificial Sequence: Synthetic oligonucleotide
  Target: APOC3; (-) strand; PAM type: YTN; PAM sequence: CTG
ggtgggaacattttctagat

SEQ ID NO: 11944 - DNA, 20 bp, Artificial Sequence
  Description of Artificial Sequence: Synthetic oligonucleotide
  Target: APOC3; (-) strand; PAM type: YTN; PAM sequence: CTA
caacagcagtcatccagcca

SEQ ID NO: 11945 - DNA, 20 bp, Artificial Sequence
  Description of Artificial Sequence: Synthetic oligonucleotide
  Target: APOC3; (-) strand; PAM type: YTN; PAM sequence: TTC
cagagctacaacagcagtca

SEQ ID NO: 11946 - DNA, 20 bp, Artificial Sequence
  Description of Artificial Sequence: Synthetic oligonucleotide
  Target: APOC3; (-) strand; PAM type: YTN; PAM sequence: CTT
ccagagctacaacagcagtc

SEQ ID NO: 11947 - DNA, 20 bp, Artificial Sequence
  Description of Artificial Sequence: Synthetic oligonucleotide
  Target: APOC3; (-) strand; PAM type: YTN; PAM sequence: CTA
accttccagagctacaacag

SEQ ID NO: 11948 - DNA, 20 bp, Artificial Sequence
  Description of Artificial Sequence: Synthetic oligonucleotide
  Target: APOC3; (-) strand; PAM type: YTN; PAM sequence: TTC
ctaaccttccagagctacaa

SEQ ID NO: 11949 - DNA, 20 bp, Artificial Sequence
  Description of Artificial Sequence: Synthetic oligonucleotide
  Target: APOC3; (-) strand; PAM type: YTN; PAM sequence: TTA
gttcctaaccttccagagct

SEQ ID NO: 11950 - DNA, 20 bp, Artificial Sequence
  Description of Artificial Sequence: Synthetic oligonucleotide
  Target: APOC3; (-) strand; PAM type: YTN; PAM sequence: TTT
agttcctaaccttccagagc

SEQ ID NO: 11951 - DNA, 20 bp, Artificial Sequence
  Description of Artificial Sequence: Synthetic oligonucleotide
  Target: APOC3; (-) strand; PAM type: YTN; PAM sequence: TTT
tagttcctaaccttccagag

SEQ ID NO: 11952 - DNA, 20 bp, Artificial Sequence
  Description of Artificial Sequence: Synthetic oligonucleotide
  Target: APOC3; (-) strand; PAM type: YTN; PAM sequence: TTT
ttagttcctaaccttccaga

SEQ ID NO: 11953 - DNA, 20 bp, Artificial Sequence
  Description of Artificial Sequence: Synthetic oligonucleotide
  Target: APOC3; (-) strand; PAM type: YTN; PAM sequence: CTT
tttagttcctaaccttccag

SEQ ID NO: 11954 - DNA, 20 bp, Artificial Sequence
  Description of Artificial Sequence: Synthetic oligonucleotide
  Target: APOC3; (-) strand; PAM type: YTN; PAM sequence: CTA
ggtaaaggagtgggcttttt

SEQ ID NO: 11955 - DNA, 20 bp, Artificial Sequence
  Description of Artificial Sequence: Synthetic oligonucleotide
  Target: APOC3; (-) strand; PAM type: YTN; PAM sequence: CTA
ccctaggtaaaggagtgggc

SEQ ID NO: 11956 - DNA, 20 bp, Artificial Sequence
  Description of Artificial Sequence: Synthetic oligonucleotide
  Target: APOC3; (-) strand; PAM type: YTN; PAM sequence: TTA
gctaccctaggtaaaggagt

SEQ ID NO: 11957 - DNA, 20 bp, Artificial Sequence
  Description of Artificial Sequence: Synthetic oligonucleotide
  Target: APOC3; (-) strand; PAM type: YTN; PAM sequence: CTT
agctaccctaggtaaaggag

SEQ ID NO: 11958 - DNA, 20 bp, Artificial Sequence
  Description of Artificial Sequence: Synthetic oligonucleotide
  Target: APOC3; (-) strand; PAM type: YTN; PAM sequence: CTC
cagtgtatcttagctaccct

SEQ ID NO: 11959 - DNA, 20 bp, Artificial Sequence
  Description of Artificial Sequence: Synthetic oligonucleotide
  Target: APOC3; (-) strand; PAM type: YTN; PAM sequence: CTG
gataatcggccccatcccca

SEQ ID NO: 11960 - DNA, 20 bp, Artificial Sequence
  Description of Artificial Sequence: Synthetic oligonucleotide
  Target: APOC3; (-) strand; PAM type: YTN; PAM sequence: CTC
atgcaggcccctggataatc

SEQ ID NO: 11961 - DNA, 20 bp, Artificial Sequence
  Description of Artificial Sequence: Synthetic oligonucleotide
  Target: APOC3; (-) strand; PAM type: YTN; PAM sequence: TTG
ccccctcatgcaggcccctg

SEQ ID NO: 11962 - DNA, 20 bp, Artificial Sequence
  Description of Artificial Sequence: Synthetic oligonucleotide
  Target: APOC3; (-) strand; PAM type: YTN; PAM sequence: TTT
gccccctcatgcaggcccct

SEQ ID NO: 11963 - DNA, 20 bp, Artificial Sequence
  Description of Artificial Sequence: Synthetic oligonucleotide
  Target: APOC3; (-) strand; PAM type: YTN; PAM sequence: TTT
tgccccctcatgcaggcccc

SEQ ID NO: 11964 - DNA, 20 bp, Artificial Sequence
  Description of Artificial Sequence: Synthetic oligonucleotide
  Target: APOC3; (-) strand; PAM type: YTN; PAM sequence: CTT
ttgccccctcatgcaggccc

SEQ ID NO: 11965 - DNA, 20 bp, Artificial Sequence
  Description of Artificial Sequence: Synthetic oligonucleotide
  Target: APOC3; (-) strand; PAM type: YTN; PAM sequence: CTG
cagggccttttgccccctca

SEQ ID NO: 11966 - DNA, 20 bp, Artificial Sequence
  Description of Artificial Sequence: Synthetic oligonucleotide
  Target: APOC3; (-) strand; PAM type: YTN; PAM sequence: CTC
tgcagggccttttgccccct

SEQ ID NO: 11967 - DNA, 20 bp, Artificial Sequence
  Description of Artificial Sequence: Synthetic oligonucleotide
  Target: APOC3; (-) strand; PAM type: YTN; PAM sequence: CTC
tctgcagggccttttgcccc

SEQ ID NO: 11968 - DNA, 20 bp, Artificial Sequence
  Description of Artificial Sequence: Synthetic oligonucleotide
  Target: APOC3; (-) strand; PAM type: YTN; PAM sequence: CTC
tctctgcagggccttttgcc

SEQ ID NO: 11969 - DNA, 20 bp, Artificial Sequence
  Description of Artificial Sequence: Synthetic oligonucleotide
  Target: APOC3; (-) strand; PAM type: YTN; PAM sequence: CTA
ccctctctctgcagggcctt

SEQ ID NO: 11970 - DNA, 20 bp, Artificial Sequence
  Description of Artificial Sequence: Synthetic oligonucleotide
  Target: APOC3; (-) strand; PAM type: YTN; PAM sequence: TTC
cctaccctctctctgcaggg

SEQ ID NO: 11971 - DNA, 20 bp, Artificial Sequence
  Description of Artificial Sequence: Synthetic oligonucleotide
  Target: APOC3; (-) strand; PAM type: YTN; PAM sequence: CTT
ccctaccctctctctgcagg

SEQ ID NO: 11972 - DNA, 20 bp, Artificial Sequence
  Description of Artificial Sequence: Synthetic oligonucleotide
  Target: APOC3; (-) strand; PAM type: YTN; PAM sequence: CTG
ggcagtgccttccctaccct

SEQ ID NO: 11973 - DNA, 20 bp, Artificial Sequence
  Description of Artificial Sequence: Synthetic oligonucleotide
  Target: APOC3; (-) strand; PAM type: YTN; PAM sequence: TTC
acagatctgggcagtgcctt

SEQ ID NO: 11974 - DNA, 20 bp, Artificial Sequence
  Description of Artificial Sequence: Synthetic oligonucleotide
  Target: APOC3; (-) strand; PAM type: YTN; PAM sequence: CTT
cacagatctgggcagtgcct

SEQ ID NO: 11975 - DNA, 20 bp, Artificial Sequence
  Description of Artificial Sequence: Synthetic oligonucleotide
  Target: APOC3; (-) strand; PAM type: YTN; PAM sequence: CTG
aatgtccccgcgtgcacgca

SEQ ID NO: 11976 - DNA, 20 bp, Artificial Sequence
  Description of Artificial Sequence: Synthetic oligonucleotide
  Target: APOC3; (-) strand; PAM type: YTN; PAM sequence: CTC
atgtctgaatgtccccgcgt

SEQ ID NO: 11977 - DNA, 20 bp, Artificial Sequence
  Description of Artificial Sequence: Synthetic oligonucleotide
  Target: APOC3; (-) strand; PAM type: YTN; PAM sequence: TTG
cactcatgtctgaatgtccc

SEQ ID NO: 11978 - DNA, 20 bp, Artificial Sequence
  Description of Artificial Sequence: Synthetic oligonucleotide
  Target: APOC3; (-) strand; PAM type: YTN; PAM sequence: CTT
gcactcatgtctgaatgtcc

SEQ ID NO: 11979 - DNA, 20 bp, Artificial Sequence
  Description of Artificial Sequence: Synthetic oligonucleotide
  Target: APOC3; (-) strand; PAM type: YTN; PAM sequence: CTC
cttgcactcatgtctgaatg

SEQ ID NO: 11980 - DNA, 20 bp, Artificial Sequence
  Description of Artificial Sequence: Synthetic oligonucleotide
  Target: APOC3; (-) strand; PAM type: YTN; PAM sequence: CTC
acggtccctccttgcactca

SEQ ID NO: 11981 - DNA, 20 bp, Artificial Sequence
  Description of Artificial Sequence: Synthetic oligonucleotide
  Target: APOC3; (-) strand; PAM type: YTN; PAM sequence: CTG
ctcacggtccctccttgcac

SEQ ID NO: 11982 - DNA, 20 bp, Artificial Sequence
  Description of Artificial Sequence: Synthetic oligonucleotide
  Target: APOC3; (-) strand; PAM type: YTN; PAM sequence: CTC
cctgctcacggtccctcctt

SEQ ID NO: 11983 - DNA, 20 bp, Artificial Sequence
  Description of Artificial Sequence: Synthetic oligonucleotide
  Target: APOC3; (-) strand; PAM type: YTN; PAM sequence: CTC
acatgacctccctgctcacg

SEQ ID NO: 11984 - DNA, 20 bp, Artificial Sequence
  Description of Artificial Sequence: Synthetic oligonucleotide
  Target: APOC3; (-) strand; PAM type: YTN; PAM sequence: TTC
tcacatgacctccctgctca

SEQ ID NO: 11985 - DNA, 20 bp, Artificial Sequence
  Description of Artificial Sequence: Synthetic oligonucleotide
  Target: APOC3; (-) strand; PAM type: YTN; PAM sequence: CTG
tgtattctcacatgacctcc

SEQ ID NO: 11986 - DNA, 20 bp, Artificial Sequence
  Description of Artificial Sequence: Synthetic oligonucleotide
  Target: APOC3; (-) strand; PAM type: YTN; PAM sequence: TTC
acatgggtgtgcaggcatgc

SEQ ID NO: 11987 - DNA, 20 bp, Artificial Sequence
  Description of Artificial Sequence: Synthetic oligonucleotide
  Target: APOC3; (-) strand; PAM type: YTN; PAM sequence: CTC
aagttcacatgggtgtgcag

SEQ ID NO: 11988 - DNA, 20 bp, Artificial Sequence
  Description of Artificial Sequence: Synthetic oligonucleotide
  Target: APOC3; (-) strand; PAM type: YTN; PAM sequence: CTG
gcactcaagttcacatgggt

SEQ ID NO: 11989 - DNA, 20 bp, Artificial Sequence
  Description of Artificial Sequence: Synthetic oligonucleotide
  Target: APOC3; (-) strand; PAM type: YTN; PAM sequence: CTA
aaaaaaaaaaaaaaaaaaaa

SEQ ID NO: 11990 - DNA, 20 bp, Artificial Sequence
  Description of Artificial Sequence: Synthetic oligonucleotide
  Target: APOC3; (-) strand; PAM type: YTN; PAM sequence: CTC
cagctaaaaaaaaaaaaaaa

SEQ ID NO: 11991 - DNA, 20 bp, Artificial Sequence
  Description of Artificial Sequence: Synthetic oligonucleotide
  Target: APOC3; (-) strand; PAM type: YTN; PAM sequence: CTG
ggcgacggagcaagactcca

SEQ ID NO: 11992 - DNA, 20 bp, Artificial Sequence
  Description of Artificial Sequence: Synthetic oligonucleotide
  Target: APOC3; (-) strand; PAM type: YTN; PAM sequence: CTC
cagcctgggcgacggagcaa

SEQ ID NO: 11993 - DNA, 20 bp, Artificial Sequence
  Description of Artificial Sequence: Synthetic oligonucleotide
  Target: APOC3; (-) strand; PAM type: YTN; PAM sequence: CTG
cactccagcctgggcgacgg

SEQ ID NO: 11994 - DNA, 20 bp, Artificial Sequence
  Description of Artificial Sequence: Synthetic oligonucleotide
  Target: APOC3; (-) strand; PAM type: YTN; PAM sequence: CTG
ggaggcagaggtcacagtga

SEQ ID NO: 11995 - DNA, 20 bp, Artificial Sequence
  Description of Artificial Sequence: Synthetic oligonucleotide
  Target: APOC3; (-) strand; PAM type: YTN; PAM sequence: TTG
aacctgggaggcagaggtca

SEQ ID NO: 11996 - DNA, 20 bp, Artificial Sequence
  Description of Artificial Sequence: Synthetic oligonucleotide
  Target: APOC3; (-) strand; PAM type: YTN; PAM sequence: CTT
gaacctgggaggcagaggtc

SEQ ID NO: 11997 - DNA, 20 bp, Artificial Sequence
  Description of Artificial Sequence: Synthetic oligonucleotide
  Target: APOC3; (-) strand; PAM type: YTN; PAM sequence: CTG
aggcaggagaatcgcttgaa

SEQ ID NO: 11998 - DNA, 20 bp, Artificial Sequence
  Description of Artificial Sequence: Synthetic oligonucleotide
  Target: APOC3; (-) strand; PAM type: YTN; PAM sequence: CTA
ggaaggctgaggcaggagaa

SEQ ID NO: 11999 - DNA, 20 bp, Artificial Sequence
  Description of Artificial Sequence: Synthetic oligonucleotide
  Target: APOC3; (-) strand; PAM type: YTN; PAM sequence: CTA
ctaggaaggctgaggcagga

SEQ ID NO: 12000 - DNA, 20 bp, Artificial Sequence
  Description of Artificial Sequence: Synthetic oligonucleotide
  Target: APOC3; (-) strand; PAM type: YTN; PAM sequence: TTG
cacccgtaatcccagctact

SEQ ID NO: 12001 - DNA, 20 bp, Artificial Sequence
  Description of Artificial Sequence: Synthetic oligonucleotide
  Target: APOC3; (-) strand; PAM type: YTN; PAM sequence: CTT
gcacccgtaatcccagctac

SEQ ID NO: 12002 - DNA, 20 bp, Artificial Sequence
  Description of Artificial Sequence: Synthetic oligonucleotide
  Target: APOC3; (-) strand; PAM type: YTN; PAM sequence: CTG
ggcatggtggcttgcacccg

SEQ ID NO: 12003 - DNA, 20 bp, Artificial Sequence
  Description of Artificial Sequence: Synthetic oligonucleotide
  Target: APOC3; (-) strand; PAM type: YTN; PAM sequence: CTA
aaaatacaaaaaaaatcagc

SEQ ID NO: 12004 - DNA, 20 bp, Artificial Sequence
  Description of Artificial Sequence: Synthetic oligonucleotide
  Target: APOC3; (-) strand; PAM type: YTN; PAM sequence: CTA
ctaaaaatacaaaaaaaatc

SEQ ID NO: 12005 - DNA, 20 bp, Artificial Sequence
  Description of Artificial Sequence: Synthetic oligonucleotide
  Target: APOC3; (-) strand; PAM type: YTN; PAM sequence: CTC
tactaaaaatacaaaaaaaa

SEQ ID NO: 12006 - DNA, 20 bp, Artificial Sequence
  Description of Artificial Sequence: Synthetic oligonucleotide
  Target: APOC3; (-) strand; PAM type: YTN; PAM sequence: CTG
tctctactaaaaatacaaaa

SEQ ID NO: 12007 - DNA, 20 bp, Artificial Sequence
  Description of Artificial Sequence: Synthetic oligonucleotide
  Target: APOC3; (-) strand; PAM type: YTN; PAM sequence: CTG
gccaatatggtgaaaccctg

SEQ ID NO: 12008 - DNA, 20 bp, Artificial Sequence
  Description of Artificial Sequence: Synthetic oligonucleotide
  Target: APOC3; (-) strand; PAM type: YTN; PAM sequence: TTG
agaccagcctggccaatatg

SEQ ID NO: 12009 - DNA, 20 bp, Artificial Sequence
  Description of Artificial Sequence: Synthetic oligonucleotide
  Target: APOC3; (-) strand; PAM type: YTN; PAM sequence: TTT
gagaccagcctggccaatat

SEQ ID NO: 12010 - DNA, 20 bp, Artificial Sequence
  Description of Artificial Sequence: Synthetic oligonucleotide
  Target: APOC3; (-) strand; PAM type: YTN; PAM sequence: TTC
aggccaggagtttgagacca

SEQ ID NO: 12011 - DNA, 20 bp, Artificial Sequence
  Description of Artificial Sequence: Synthetic oligonucleotide
  Target: APOC3; (-) strand; PAM type: YTN; PAM sequence: CTT
caggccaggagtttgagacc

SEQ ID NO: 12012 - DNA, 20 bp, Artificial Sequence
  Description of Artificial Sequence: Synthetic oligonucleotide
  Target: APOC3; (-) strand; PAM type: YTN; PAM sequence: CTG
aggtgggcgtatcacttcag

SEQ ID NO: 12013 - DNA, 20 bp, Artificial Sequence
  Description of Artificial Sequence: Synthetic oligonucleotide
  Target: APOC3; (-) strand; PAM type: YTN; PAM sequence: TTG
ggaggctgaggtgggcgtat

SEQ ID NO: 12014 - DNA, 20 bp, Artificial Sequence
  Description of Artificial Sequence: Synthetic oligonucleotide
  Target: APOC3; (-) strand; PAM type: YTN; PAM sequence: TTT
gggaggctgaggtgggcgta

SEQ ID NO: 12015 - DNA, 20 bp, Artificial Sequence
  Description of Artificial Sequence: Synthetic oligonucleotide
  Target: APOC3; (-) strand; PAM type: YTN; PAM sequence: CTT
tgggaggctgaggtgggcgt

SEQ ID NO: 12016 - DNA, 20 bp, Artificial Sequence
  Description of Artificial Sequence: Synthetic oligonucleotide
  Target: APOC3; (-) strand; PAM type: YTN; PAM sequence: CTG
taatcccagcactttgggag

SEQ ID NO: 12017 - DNA, 20 bp, Artificial Sequence
  Description of Artificial Sequence: Synthetic oligonucleotide
  Target: APOC3; (-) strand; PAM type: YTN; PAM sequence: CTC
aagcctgtaatcccagcact

SEQ ID NO: 12018 - DNA, 20 bp, Artificial Sequence
  Description of Artificial Sequence: Synthetic oligonucleotide
  Target: APOC3; (-) strand; PAM type: YTN; PAM sequence: TTG
aaaagagtgcgcgggtcggg

SEQ ID NO: 12019 - DNA, 20 bp, Artificial Sequence
  Description of Artificial Sequence: Synthetic oligonucleotide
  Target: APOC3; (-) strand; PAM type: YTN; PAM sequence: TTA
ttgaaaagagtgcgcgggtc

SEQ ID NO: 12020 - DNA, 20 bp, Artificial Sequence
  Description of Artificial Sequence: Synthetic oligonucleotide
  Target: APOC3; (-) strand; PAM type: YTN; PAM sequence: CTG
gccatccatgattattgaaa

SEQ ID NO: 12021 - DNA, 20 bp, Artificial Sequence
  Description of Artificial Sequence: Synthetic oligonucleotide
  Target: APOC3; (-) strand; PAM type: YTN; PAM sequence: CTG
cacccctggccatccatgat

SEQ ID NO: 12022 - DNA, 20 bp, Artificial Sequence
  Description of Artificial Sequence: Synthetic oligonucleotide
  Target: APOC3; (-) strand; PAM type: YTN; PAM sequence: TTA
gaccctgcacccctggccat

SEQ ID NO: 12023 - DNA, 20 bp, Artificial Sequence
  Description of Artificial Sequence: Synthetic oligonucleotide
  Target: APOC3; (-) strand; PAM type: YTN; PAM sequence: TTT
agaccctgcacccctggcca

SEQ ID NO: 12024 - DNA, 20 bp, Artificial Sequence
  Description of Artificial Sequence: Synthetic oligonucleotide
  Target: APOC3; (-) strand; PAM type: YTN; PAM sequence: TTT
tagaccctgcacccctggcc

SEQ ID NO: 12025 - DNA, 20 bp, Artificial Sequence
  Description of Artificial Sequence: Synthetic oligonucleotide
  Target: APOC3; (-) strand; PAM type: YTN; PAM sequence: TTT
ttagaccctgcacccctggc

SEQ ID NO: 12026 - DNA, 20 bp, Artificial Sequence
  Description of Artificial Sequence: Synthetic oligonucleotide
  Target: APOC3; (-) strand; PAM type: YTN; PAM sequence: CTT
tttagaccctgcacccctgg

SEQ ID NO: 12027 - DNA, 20 bp, Artificial Sequence
  Description of Artificial Sequence: Synthetic oligonucleotide
  Target: APOC3; (-) strand; PAM type: YTN; PAM sequence: CTA
ggccgcgctttttagaccct

SEQ ID NO: 12028 - DNA, 20 bp, Artificial Sequence
  Description of Artificial Sequence: Synthetic oligonucleotide
  Target: APOC3; (-) strand; PAM type: YTN; PAM sequence: TTG
cccagtgaacagcaggatgg

SEQ ID NO: 12029 - DNA, 20 bp, Artificial Sequence
  Description of Artificial Sequence: Synthetic oligonucleotide
  Target: APOC3; (-) strand; PAM type: YTN; PAM sequence: CTT
gcccagtgaacagcaggatg

SEQ ID NO: 12030 - DNA, 20 bp, Artificial Sequence
  Description of Artificial Sequence: Synthetic oligonucleotide
  Target: APOC3; (-) strand; PAM type: YTN; PAM sequence: CTG
tgacgtcgcttgcccagtga

SEQ ID NO: 12031 - DNA, 20 bp, Artificial Sequence
  Description of Artificial Sequence: Synthetic oligonucleotide
  Target: APOC3; (-) strand; PAM type: YTN; PAM sequence: CTG
gacctgtgacgtcgcttgcc

SEQ ID NO: 12032 - DNA, 20 bp, Artificial Sequence
  Description of Artificial Sequence: Synthetic oligonucleotide
  Target: APOC3; (-) strand; PAM type: YTN; PAM sequence: CTG
aagcctggacctgtgacgtc

SEQ ID NO: 12033 - DNA, 20 bp, Artificial Sequence
  Description of Artificial Sequence: Synthetic oligonucleotide
  Target: APOC3; (-) strand; PAM type: YTN; PAM sequence: TTG
ccatcagacgcagagcatgg

SEQ ID NO: 12034 - DNA, 20 bp, Artificial Sequence
  Description of Artificial Sequence: Synthetic oligonucleotide
  Target: APOC3; (-) strand; PAM type: YTN; PAM sequence: CTA
gattgccatcagacgcagag

SEQ ID NO: 12035 - DNA, 20 bp, Artificial Sequence
  Description of Artificial Sequence: Synthetic oligonucleotide
  Target: APOC3; (-) strand; PAM type: YTN; PAM sequence: CTG
gctagattgccatcagacgc

SEQ ID NO: 12036 - DNA, 20 bp, Artificial Sequence
  Description of Artificial Sequence: Synthetic oligonucleotide
  Target: APOC3; (-) strand; PAM type: YTN; PAM sequence: TTC
cccacatcctggctagattg

SEQ ID NO: 12037 - DNA, 20 bp, Artificial Sequence
  Description of Artificial Sequence: Synthetic oligonucleotide
  Target: APOC3; (-) strand; PAM type: YTN; PAM sequence: CTT
ccccacatcctggctagatt

SEQ ID NO: 12038 - DNA, 20 bp, Artificial Sequence
  Description of Artificial Sequence: Synthetic oligonucleotide
  Target: APOC3; (-) strand; PAM type: YTN; PAM sequence: CTC
ccttccccacatcctggcta

SEQ ID NO: 12039 - DNA, 20 bp, Artificial Sequence
  Description of Artificial Sequence: Synthetic oligonucleotide
  Target: APOC3; (-) strand; PAM type: YTN; PAM sequence: CTG
catcctcccttccccacatc

SEQ ID NO: 12040 - DNA, 20 bp, Artificial Sequence
  Description of Artificial Sequence: Synthetic oligonucleotide
  Target: APOC3; (-) strand; PAM type: YTN; PAM sequence: CTC
actgcatcctcccttcccca

SEQ ID NO: 12041 - DNA, 20 bp, Artificial Sequence
  Description of Artificial Sequence: Synthetic oligonucleotide
  Target: APOC3; (-) strand; PAM type: YTN; PAM sequence: CTC
tcactgcatcctcccttccc

SEQ ID NO: 12042 - DNA, 20 bp, Artificial Sequence
  Description of Artificial Sequence: Synthetic oligonucleotide
  Target: APOC3; (-) strand; PAM type: YTN; PAM sequence: CTG
tgctctcactgcatcctccc

SEQ ID NO: 12043 - DNA, 20 bp, Artificial Sequence
  Description of Artificial Sequence: Synthetic oligonucleotide
  Target: APOC3; (-) strand; PAM type: YTN; PAM sequence: CTC
atatctgtgctctcactgca

SEQ ID NO: 12044 - DNA, 20 bp, Artificial Sequence
  Description of Artificial Sequence: Synthetic oligonucleotide
  Target: APOC3; (-) strand; PAM type: YTN; PAM sequence: CTC
tcatatctgtgctctcactg

SEQ ID NO: 12045 - DNA, 20 bp, Artificial Sequence
  Description of Artificial Sequence: Synthetic oligonucleotide
  Target: APOC3; (-) strand; PAM type: YTN; PAM sequence: TTC
caagatgctctcatatctgt

SEQ ID NO: 12046 - DNA, 20 bp, Artificial Sequence
  Description of Artificial Sequence: Synthetic oligonucleotide
  Target: APOC3; (-) strand; PAM type: YTN; PAM sequence: TTT
ccaagatgctctcatatctg

SEQ ID NO: 12047 - DNA, 20 bp, Artificial Sequence
  Description of Artificial Sequence: Synthetic oligonucleotide
  Target: APOC3; (-) strand; PAM type: YTN; PAM sequence: TTA
tttccaagatgctctcatat

SEQ ID NO: 12048 - DNA, 20 bp, Artificial Sequence
  Description of Artificial Sequence: Synthetic oligonucleotide
  Target: APOC3; (-) strand; PAM type: YTN; PAM sequence: TTT
atttccaagatgctctcata

SEQ ID NO: 12049 - DNA, 20 bp, Artificial Sequence
  Description of Artificial Sequence: Synthetic oligonucleotide
  Target: APOC3; (-) strand; PAM type: YTN; PAM sequence: TTT
tatttccaagatgctctcat

SEQ ID NO: 12050 - DNA, 20 bp, Artificial Sequence
  Description of Artificial Sequence: Synthetic oligonucleotide
  Target: APOC3; (-) strand; PAM type: YTN; PAM sequence: TTT
ttatttccaagatgctctca

SEQ ID NO: 12051 - DNA, 20 bp, Artificial Sequence
  Description of Artificial Sequence: Synthetic oligonucleotide
  Target: APOC3; (-) strand; PAM type: YTN; PAM sequence: TTG
caggtacatttttatttcca

SEQ ID NO: 12052 - DNA, 20 bp, Artificial Sequence
  Description of Artificial Sequence: Synthetic oligonucleotide
  Target: APOC3; (-) strand; PAM type: YTN; PAM sequence: CTT
gcaggtacatttttatttcc

SEQ ID NO: 12053 - DNA, 20 bp, Artificial Sequence
  Description of Artificial Sequence: Synthetic oligonucleotide
  Target: APOC3; (-) strand; PAM type: YTN; PAM sequence: CTC
ttgcaggtacatttttattt

SEQ ID NO: 12054 - DNA, 20 bp, Artificial Sequence
  Description of Artificial Sequence: Synthetic oligonucleotide
  Target: APOC3; (-) strand; PAM type: YTN; PAM sequence: TTC
accaccacctcttgcaggta

SEQ ID NO: 12055 - DNA, 20 bp, Artificial Sequence
  Description of Artificial Sequence: Synthetic oligonucleotide
  Target: APOC3; (-) strand; PAM type: YTN; PAM sequence: CTG
agtaagaaaattcaccacca

SEQ ID NO: 12056 - DNA, 20 bp, Artificial Sequence
  Description of Artificial Sequence: Synthetic oligonucleotide
  Target: APOC3; (-) strand; PAM type: YTN; PAM sequence: CTG
gcctgagtaagaaaattcac

SEQ ID NO: 12057 - DNA, 20 bp, Artificial Sequence
  Description of Artificial Sequence: Synthetic oligonucleotide
  Target: APOC3; (-) strand; PAM type: YTN; PAM sequence: CTG
gcagaagctggcctgagtaa

SEQ ID NO: 12058 - DNA, 20 bp, Artificial Sequence
  Description of Artificial Sequence: Synthetic oligonucleotide
  Target: APOC3; (-) strand; PAM type: YTN; PAM sequence: CTG
ccagccctggcagaagctgg

SEQ ID NO: 12059 - DNA, 20 bp, Artificial Sequence
  Description of Artificial Sequence: Synthetic oligonucleotide
  Target: APOC3; (-) strand; PAM type: YTN; PAM sequence: TTC
tgccagccctggcagaagct

SEQ ID NO: 12060 - DNA, 20 bp, Artificial Sequence
  Description of Artificial Sequence: Synthetic oligonucleotide
  Target: APOC3; (-) strand; PAM type: YTN; PAM sequence: TTT
ctgccagccctggcagaagc

SEQ ID NO: 12061 - DNA, 20 bp, Artificial Sequence
  Description of Artificial Sequence: Synthetic oligonucleotide
  Target: APOC3; (-) strand; PAM type: YTN; PAM sequence: CTT
tctgccagccctggcagaag

SEQ ID NO: 12062 - DNA, 20 bp, Artificial Sequence
  Description of Artificial Sequence: Synthetic oligonucleotide
  Target: APOC3; (-) strand; PAM type: YTN; PAM sequence: CTC
tttctgccagccctggcaga

SEQ ID NO: 12063 - DNA, 20 bp, Artificial Sequence
  Description of Artificial Sequence: Synthetic oligonucleotide
  Target: APOC3; (-) strand; PAM type: YTN; PAM sequence: CTC
catgccatgccaccccctct

SEQ ID NO: 12064 - DNA, 20 bp, Artificial Sequence
  Description of Artificial Sequence: Synthetic oligonucleotide
  Target: APOC3; (-) strand; PAM type: YTN; PAM sequence: CTG
cggctccatgccatgccacc

SEQ ID NO: 12065 - DNA, 20 bp, Artificial Sequence
  Description of Artificial Sequence: Synthetic oligonucleotide
  Target: APOC3; (-) strand; PAM type: YTN; PAM sequence: CTC
caccccctgcggctccatgc

SEQ ID NO: 12066 - DNA, 20 bp, Artificial Sequence
  Description of Artificial Sequence: Synthetic oligonucleotide
  Target: APOC3; (-) strand; PAM type: YTN; PAM sequence: CTC
aggcacagcagtggaagcca

SEQ ID NO: 12067 - DNA, 20 bp, Artificial Sequence
  Description of Artificial Sequence: Synthetic oligonucleotide
  Target: APOC3; (-) strand; PAM type: YTN; PAM sequence: TTC
ctcaggcacagcagtggaag

SEQ ID NO: 12068 - DNA, 20 bp, Artificial Sequence
  Description of Artificial Sequence: Synthetic oligonucleotide
  Target: APOC3; (-) strand; PAM type: YTN; PAM sequence: CTT
cctcaggcacagcagtggaa

SEQ ID NO: 12069 - DNA, 20 bp, Artificial Sequence
  Description of Artificial Sequence: Synthetic oligonucleotide
  Target: APOC3; (-) strand; PAM type: YTN; PAM sequence: CTC
ccatcccgcccagaaacagc

SEQ ID NO: 12070 - DNA, 20 bp, Artificial Sequence
  Description of Artificial Sequence: Synthetic oligonucleotide
  Target: APOC3; (-) strand; PAM type: YTN; PAM sequence: CTA
ctcccatcccgcccagaaac

SEQ ID NO: 12071 - DNA, 20 bp, Artificial Sequence
  Description of Artificial Sequence: Synthetic oligonucleotide
  Target: APOC3; (-) strand; PAM type: YTN; PAM sequence: CTC
ccactactcccatcccgccc

SEQ ID NO: 12072 - DNA, 20 bp, Artificial Sequence
  Description of Artificial Sequence: Synthetic oligonucleotide
  Target: APOC3; (-) strand; PAM type: YTN; PAM sequence: CTC
acaaggccagtatccccctc

SEQ ID NO: 12073 - DNA, 20 bp, Artificial Sequence
  Description of Artificial Sequence: Synthetic oligonucleotide
  Target: APOC3; (-) strand; PAM type: YTN; PAM sequence: TTC
tcacaaggccagtatccccc

SEQ ID NO: 12074 - DNA, 20 bp, Artificial Sequence
  Description of Artificial Sequence: Synthetic oligonucleotide
  Target: APOC3; (-) strand; PAM type: YTN; PAM sequence: CTT
ctcacaaggccagtatcccc

SEQ ID NO: 12075 - DNA, 20 bp, Artificial Sequence
  Description of Artificial Sequence: Synthetic oligonucleotide
  Target: APOC3; (-) strand; PAM type: YTN; PAM sequence: TTC
ttctcacaaggccagtatcc

SEQ ID NO: 12076 - DNA, 20 bp, Artificial Sequence
  Description of Artificial Sequence: Synthetic oligonucleotide
  Target: APOC3; (-) strand; PAM type: YTN; PAM sequence: TTT
cttctcacaaggccagtatc

SEQ ID NO: 12077 - DNA, 20 bp, Artificial Sequence
  Description of Artificial Sequence: Synthetic oligonucleotide
  Target: APOC3; (-) strand; PAM type: YTN; PAM sequence: TTT
tcttctcacaaggccagtat

SEQ ID NO: 12078 - DNA, 20 bp, Artificial Sequence
  Description of Artificial Sequence: Synthetic oligonucleotide
  Target: APOC3; (-) strand; PAM type: YTN; PAM sequence: CTT
ttcttctcacaaggccagta

SEQ ID NO: 12079 - DNA, 20 bp, Artificial Sequence
  Description of Artificial Sequence: Synthetic oligonucleotide
  Target: APOC3; (-) strand; PAM type: YTN; PAM sequence: TTC
ccttttcttctcacaaggcc

SEQ ID NO: 12080 - DNA, 20 bp, Artificial Sequence
  Description of Artificial Sequence: Synthetic oligonucleotide
  Target: APOC3; (-) strand; PAM type: YTN; PAM sequence: CTT
cccttttcttctcacaaggc

SEQ ID NO: 12081 - DNA, 20 bp, Artificial Sequence
  Description of Artificial Sequence: Synthetic oligonucleotide
  Target: APOC3; (-) strand; PAM type: YTN; PAM sequence: CTC
aaacagacacttcccttttc

SEQ ID NO: 12082 - DNA, 20 bp, Artificial Sequence
  Description of Artificial Sequence: Synthetic oligonucleotide
  Target: APOC3; (-) strand; PAM type: YTN; PAM sequence: CTC
tcaaacagacacttcccttt

SEQ ID NO: 12083 - DNA, 20 bp, Artificial Sequence
  Description of Artificial Sequence: Synthetic oligonucleotide
  Target: APOC3; (-) strand; PAM type: YTN; PAM sequence: TTC
aaaaacctctcaaacagaca

SEQ ID NO: 12084 - DNA, 20 bp, Artificial Sequence
  Description of Artificial Sequence: Synthetic oligonucleotide
  Target: APOC3; (-) strand; PAM type: YTN; PAM sequence: CTA
attcaaaaacctctcaaaca

SEQ ID NO: 12085 - DNA, 20 bp, Artificial Sequence
  Description of Artificial Sequence: Synthetic oligonucleotide
  Target: APOC3; (-) strand; PAM type: YTN; PAM sequence: TTA
ctaattcaaaaacctctcaa

SEQ ID NO: 12086 - DNA, 20 bp, Artificial Sequence
  Description of Artificial Sequence: Synthetic oligonucleotide
  Target: APOC3; (-) strand; PAM type: YTN; PAM sequence: TTT
actaattcaaaaacctctca

SEQ ID NO: 12087 - DNA, 20 bp, Artificial Sequence
  Description of Artificial Sequence: Synthetic oligonucleotide
  Target: APOC3; (-) strand; PAM type: YTN; PAM sequence: CTT
tactaattcaaaaacctctc

SEQ ID NO: 12088 - DNA, 20 bp, Artificial Sequence
  Description of Artificial Sequence: Synthetic oligonucleotide
  Target: APOC3; (-) strand; PAM type: YTN; PAM sequence: CTC
ctttactaattcaaaaacct

SEQ ID NO: 12089 - DNA, 20 bp, Artificial Sequence
  Description of Artificial Sequence: Synthetic oligonucleotide
  Target: APOC3; (-) strand; PAM type: YTN; PAM sequence: CTG
tcctcctttactaattcaaa

SEQ ID NO: 12090 - DNA, 20 bp, Artificial Sequence
  Description of Artificial Sequence: Synthetic oligonucleotide
  Target: APOC3; (-) strand; PAM type: YTN; PAM sequence: TTG
cgcctgtcctcctttactaa

SEQ ID NO: 12091 - DNA, 20 bp, Artificial Sequence
  Description of Artificial Sequence: Synthetic oligonucleotide
  Target: APOC3; (-) strand; PAM type: YTN; PAM sequence: TTT
gcgcctgtcctcctttacta

SEQ ID NO: 12092 - DNA, 20 bp, Artificial Sequence
  Description of Artificial Sequence: Synthetic oligonucleotide
  Target: APOC3; (-) strand; PAM type: YTN; PAM sequence: TTG
gagtttgcgcctgtcctcct

SEQ ID NO: 12093 - DNA, 20 bp, Artificial Sequence
  Description of Artificial Sequence: Synthetic oligonucleotide
  Target: APOC3; (-) strand; PAM type: YTN; PAM sequence: CTT
ggagtttgcgcctgtcctcc

SEQ ID NO: 12094 - DNA, 20 bp, Artificial Sequence
  Description of Artificial Sequence: Synthetic oligonucleotide
  Target: APOC3; (-) strand; PAM type: YTN; PAM sequence: TTG
gtcccgggtgcaagtgaagc

SEQ ID NO: 12095 - DNA, 20 bp, Artificial Sequence
  Description of Artificial Sequence: Synthetic oligonucleotide
  Target: APOC3; (-) strand; PAM type: YTN; PAM sequence: TTT
ggtcccgggtgcaagtgaag

SEQ ID NO: 12096 - DNA, 20 bp, Artificial Sequence
  Description of Artificial Sequence: Synthetic oligonucleotide
  Target: APOC3; (-) strand; PAM type: YTN; PAM sequence: TTG
gggtttggtcccgggtgcaa

SEQ ID NO: 12097 - DNA, 20 bp, Artificial Sequence
  Description of Artificial Sequence: Synthetic oligonucleotide
  Target: APOC3; (-) strand; PAM type: YTN; PAM sequence: CTG
ggattggggtttggtcccgg

SEQ ID NO: 12098 - DNA, 20 bp, Artificial Sequence
  Description of Artificial Sequence: Synthetic oligonucleotide
  Target: APOC3; (-) strand; PAM type: YTN; PAM sequence: CTC
agggagccagccactgggat

SEQ ID NO: 12099 - DNA, 20 bp, Artificial Sequence
  Description of Artificial Sequence: Synthetic oligonucleotide
  Target: APOC3; (-) strand; PAM type: YTN; PAM sequence: CTG
tcagcggggcgggacggagc

SEQ ID NO: 12100 - DNA, 20 bp, Artificial Sequence
  Description of Artificial Sequence: Synthetic oligonucleotide
  Target: APOC3; (-) strand; PAM type: YTN; PAM sequence: CTC
cagcccagccgctgtcagcg

SEQ ID NO: 12101 - DNA, 20 bp, Artificial Sequence
  Description of Artificial Sequence: Synthetic oligonucleotide
  Target: APOC3; (-) strand; PAM type: YTN; PAM sequence: TTC
tccagcccagccgctgtcag

SEQ ID NO: 12102 - DNA, 20 bp, Artificial Sequence
  Description of Artificial Sequence: Synthetic oligonucleotide
  Target: APOC3; (-) strand; PAM type: YTN; PAM sequence: CTT
ctccagcccagccgctgtca

SEQ ID NO: 12103 - DNA, 20 bp, Artificial Sequence
  Description of Artificial Sequence: Synthetic oligonucleotide
  Target: APOC3; (-) strand; PAM type: YTN; PAM sequence: TTC
cccgtccccagaggtgtgtc

SEQ ID NO: 12104 - DNA, 20 bp, Artificial Sequence
  Description of Artificial Sequence: Synthetic oligonucleotide
  Target: APOC3; (-) strand; PAM type: YTN; PAM sequence: CTG
ggagcagtgggttccccgtc

SEQ ID NO: 12105 - DNA, 20 bp, Artificial Sequence
  Description of Artificial Sequence: Synthetic oligonucleotide
  Target: APOC3; (-) strand; PAM type: YTN; PAM sequence: TTA
gctgggagcagtgggttccc

SEQ ID NO: 12106 - DNA, 20 bp, Artificial Sequence
  Description of Artificial Sequence: Synthetic oligonucleotide
  Target: APOC3; (-) strand; PAM type: YTN; PAM sequence: TTT
agctgggagcagtgggttcc

SEQ ID NO: 12107 - DNA, 20 bp, Artificial Sequence
  Description of Artificial Sequence: Synthetic oligonucleotide
  Target: APOC3; (-) strand; PAM type: YTN; PAM sequence: CTT
tagctgggagcagtgggttc

SEQ ID NO: 12108 - DNA, 20 bp, Artificial Sequence
  Description of Artificial Sequence: Synthetic oligonucleotide
  Target: APOC3; (-) strand; PAM type: YTN; PAM sequence: TTG
ctttagctgggagcagtggg

SEQ ID NO: 12109 - DNA, 20 bp, Artificial Sequence
  Description of Artificial Sequence: Synthetic oligonucleotide
  Target: APOC3; (-) strand; PAM type: YTN; PAM sequence: CTG
aggcgggccaggaaacaggg

SEQ ID NO: 12110 - DNA, 20 bp, Artificial Sequence
  Description of Artificial Sequence: Synthetic oligonucleotide
  Target: APOC3; (-) strand; PAM type: YTN; PAM sequence: CTG
tctgaggcgggccaggaaac

SEQ ID NO: 12111 - DNA, 20 bp, Artificial Sequence
  Description of Artificial Sequence: Synthetic oligonucleotide
  Target: APOC3; (-) strand; PAM type: YTN; PAM sequence: CTG
cagccctgtctgaggcgggc

SEQ ID NO: 12112 - DNA, 20 bp, Artificial Sequence
  Description of Artificial Sequence: Synthetic oligonucleotide
  Target: APOC3; (-) strand; PAM type: YTN; PAM sequence: CTC
aaacaaggcctgcagccctg

SEQ ID NO: 12113 - DNA, 20 bp, Artificial Sequence
  Description of Artificial Sequence: Synthetic oligonucleotide
  Target: APOC3; (-) strand; PAM type: YTN; PAM sequence: CTG
aaaggggctcaaacaaggcc

SEQ ID NO: 12114 - DNA, 20 bp, Artificial Sequence
  Description of Artificial Sequence: Synthetic oligonucleotide
  Target: APOC3; (-) strand; PAM type: YTN; PAM sequence: CTC
aagtagaaaggaagtcacag

SEQ ID NO: 12115 - DNA, 20 bp, Artificial Sequence
  Description of Artificial Sequence: Synthetic oligonucleotide
  Target: APOC3; (-) strand; PAM type: YTN; PAM sequence: TTA
gcaaggctcaagtagaaagg

SEQ ID NO: 12116 - DNA, 20 bp, Artificial Sequence
  Description of Artificial Sequence: Synthetic oligonucleotide
  Target: APOC3; (-) strand; PAM type: YTN; PAM sequence: CTT
agcaaggctcaagtagaaag

SEQ ID NO: 12117 - DNA, 20 bp, Artificial Sequence
  Description of Artificial Sequence: Synthetic oligonucleotide
  Target: APOC3; (-) strand; PAM type: YTN; PAM sequence: CTG
ccttagcaaggctcaagtag

SEQ ID NO: 12118 - DNA, 20 bp, Artificial Sequence
  Description of Artificial Sequence: Synthetic oligonucleotide
  Target: APOC3; (-) strand; PAM type: YTN; PAM sequence: TTA
cgagtgagggagtagagtct

SEQ ID NO: 12119 - DNA, 20 bp, Artificial Sequence
  Description of Artificial Sequence: Synthetic oligonucleotide
  Target: APOC3; (-) strand; PAM type: YTN; PAM sequence: CTT
acgagtgagggagtagagtc

SEQ ID NO: 12120 - DNA, 20 bp, Artificial Sequence
  Description of Artificial Sequence: Synthetic oligonucleotide
  Target: APOC3; (-) strand; PAM type: YTN; PAM sequence: CTG
cttacgagtgagggagtaga

SEQ ID NO: 12121 - DNA, 20 bp, Artificial Sequence
  Description of Artificial Sequence: Synthetic oligonucleotide
  Target: APOC3; (-) strand; PAM type: YTN; PAM sequence: CTG
gctgcttacgagtgagggag

SEQ ID NO: 12122 - DNA, 20 bp, Artificial Sequence
  Description of Artificial Sequence: Synthetic oligonucleotide
  Target: APOC3; (-) strand; PAM type: YTN; PAM sequence: CTG
gacgcctggctgcttacgag

SEQ ID NO: 12123 - DNA, 20 bp, Artificial Sequence
  Description of Artificial Sequence: Synthetic oligonucleotide
  Target: APOC3; (-) strand; PAM type: YTN; PAM sequence: CTG
ctggacgcctggctgcttac

SEQ ID NO: 12124 - DNA, 20 bp, Artificial Sequence
  Description of Artificial Sequence: Synthetic oligonucleotide
  Target: APOC3; (-) strand; PAM type: YTN; PAM sequence: TTG
gaggacctgctggacgcctg

SEQ ID NO: 12125 - DNA, 20 bp, Artificial Sequence
  Description of Artificial Sequence: Synthetic oligonucleotide
  Target: APOC3; (-) strand; PAM type: YTN; PAM sequence: TTA
gggccaagatcgacgttgga

SEQ ID NO: 12126 - DNA, 20 bp, Artificial Sequence
  Description of Artificial Sequence: Synthetic oligonucleotide
  Target: APOC3; (-) strand; PAM type: YTN; PAM sequence: CTT
agggccaagatcgacgttgg

SEQ ID NO: 12127 - DNA, 20 bp, Artificial Sequence
  Description of Artificial Sequence: Synthetic oligonucleotide
  Target: APOC3; (-) strand; PAM type: YTN; PAM sequence: CTG
gacgtcttagggccaagatc

SEQ ID NO: 12128 - DNA, 20 bp, Artificial Sequence
  Description of Artificial Sequence: Synthetic oligonucleotide
  Target: APOC3; (-) strand; PAM type: YTN; PAM sequence: CTC
cgtgcccagactggacgtct

SEQ ID NO: 12129 - DNA, 20 bp, Artificial Sequence
  Description of Artificial Sequence: Synthetic oligonucleotide
  Target: APOC3; (-) strand; PAM type: YTN; PAM sequence: CTC
aacaactccgtgcccagact

SEQ ID NO: 12130 - DNA, 20 bp, Artificial Sequence
  Description of Artificial Sequence: Synthetic oligonucleotide
  Target: APOC3; (-) strand; PAM type: YTN; PAM sequence: CTG
ccggatctcaacaactccgt

SEQ ID NO: 12131 - DNA, 20 bp, Artificial Sequence
  Description of Artificial Sequence: Synthetic oligonucleotide
  Target: APOC3; (-) strand; PAM type: YTN; PAM sequence: TTC
ctgccggatctcaacaactc

SEQ ID NO: 12132 - DNA, 20 bp, Artificial Sequence
  Description of Artificial Sequence: Synthetic oligonucleotide
  Target: APOC3; (-) strand; PAM type: YTN; PAM sequence: CTT
cctgccggatctcaacaact

SEQ ID NO: 12133 - DNA, 20 bp, Artificial Sequence
  Description of Artificial Sequence: Synthetic oligonucleotide
  Target: APOC3; (-) strand; PAM type: YTN; PAM sequence: CTG
gagcagggacttcctgccgg

SEQ ID NO: 12134 - DNA, 20 bp, Artificial Sequence
  Description of Artificial Sequence: Synthetic oligonucleotide
  Target: APOC3; (-) strand; PAM type: YTN; PAM sequence: TTG
gccctggagcagggacttcc

SEQ ID NO: 12135 - DNA, 20 bp, Artificial Sequence
  Description of Artificial Sequence: Synthetic oligonucleotide
  Target: APOC3; (-) strand; PAM type: YTN; PAM sequence: TTT
ggccctggagcagggacttc

SEQ ID NO: 12136 - DNA, 20 bp, Artificial Sequence
  Description of Artificial Sequence: Synthetic oligonucleotide
  Target: APOC3; (-) strand; PAM type: YTN; PAM sequence: CTT
tggccctggagcagggactt

SEQ ID NO: 12137 - DNA, 20 bp, Artificial Sequence
  Description of Artificial Sequence: Synthetic oligonucleotide
  Target: APOC3; (-) strand; PAM type: YTN; PAM sequence: TTG
ggagaatagaggggggtgcg

SEQ ID NO: 12138 - DNA, 20 bp, Artificial Sequence
  Description of Artificial Sequence: Synthetic oligonucleotide
  Target: APOC3; (-) strand; PAM type: YTN; PAM sequence: TTT
gggagaatagaggggggtgc

SEQ ID NO: 12139 - DNA, 20 bp, Artificial Sequence
  Description of Artificial Sequence: Synthetic oligonucleotide
  Target: APOC3; (-) strand; PAM type: YTN; PAM sequence: TTT
tgggagaatagaggggggtg

SEQ ID NO: 12140 - DNA, 20 bp, Artificial Sequence
  Description of Artificial Sequence: Synthetic oligonucleotide
  Target: APOC3; (-) strand; PAM type: YTN; PAM sequence: CTT
ttgggagaatagaggggggt

SEQ ID NO: 12141 - DNA, 20 bp, Artificial Sequence
  Description of Artificial Sequence: Synthetic oligonucleotide
  Target: APOC3; (-) strand; PAM type: YTN; PAM sequence: TTC
ttttgggagaatagaggggg

SEQ ID NO: 12142 - DNA, 20 bp, Artificial Sequence
  Description of Artificial Sequence: Synthetic oligonucleotide
  Target: APOC3; (-) strand; PAM type: YTN; PAM sequence: TTT
cttttgggagaatagagggg

SEQ ID NO: 12143 - DNA, 20 bp, Artificial Sequence
  Description of Artificial Sequence: Synthetic oligonucleotide
  Target: APOC3; (-) strand; PAM type: YTN; PAM sequence: CTT
tcttttgggagaatagaggg

SEQ ID NO: 12144 - DNA, 20 bp, Artificial Sequence
  Description of Artificial Sequence: Synthetic oligonucleotide
  Target: APOC3; (-) strand; PAM type: YTN; PAM sequence: TTC
tttcttttgggagaatagag

SEQ ID NO: 12145 - DNA, 20 bp, Artificial Sequence
  Description of Artificial Sequence: Synthetic oligonucleotide
  Target: APOC3; (-) strand; PAM type: YTN; PAM sequence: CTT
ctttcttttgggagaataga

SEQ ID NO: 12146 - DNA, 20 bp, Artificial Sequence
  Description of Artificial Sequence: Synthetic oligonucleotide
  Target: APOC3; (-) strand; PAM type: YTN; PAM sequence: TTC
caaagtgggaagcagcttct

SEQ ID NO: 12147 - DNA, 20 bp, Artificial Sequence
  Description of Artificial Sequence: Synthetic oligonucleotide
  Target: APOC3; (-) strand; PAM type: YTN; PAM sequence: TTT
ccaaagtgggaagcagcttc

SEQ ID NO: 12148 - DNA, 20 bp, Artificial Sequence
  Description of Artificial Sequence: Synthetic oligonucleotide
  Target: APOC3; (-) strand; PAM type: YTN; PAM sequence: CTC
agaataaacgtttccaaagt

SEQ ID NO: 12149 - DNA, 20 bp, Artificial Sequence
  Description of Artificial Sequence: Synthetic oligonucleotide
  Target: APOC3; (-) strand; PAM type: YTN; PAM sequence: TTC
ccggtgctcagaataaacgt

SEQ ID NO: 12150 - DNA, 20 bp, Artificial Sequence
  Description of Artificial Sequence: Synthetic oligonucleotide
  Target: APOC3; (-) strand; PAM type: YTN; PAM sequence: CTT
cccggtgctcagaataaacg

SEQ ID NO: 12151 - DNA, 20 bp, Artificial Sequence
  Description of Artificial Sequence: Synthetic oligonucleotide
  Target: APOC3; (-) strand; PAM type: YTN; PAM sequence: CTC
aacacccagtgaggcgcccg

SEQ ID NO: 12152 - DNA, 20 bp, Artificial Sequence
  Description of Artificial Sequence: Synthetic oligonucleotide
  Target: APOC3; (-) strand; PAM type: YTN; PAM sequence: CTA
agaagctcaacacccagtga

SEQ ID NO: 12153 - DNA, 20 bp, Artificial Sequence
  Description of Artificial Sequence: Synthetic oligonucleotide
  Target: APOC3; (-) strand; PAM type: YTN; PAM sequence: CTC
gaggagtacactaagaagct

SEQ ID NO: 12154 - DNA, 20 bp, Artificial Sequence
  Description of Artificial Sequence: Synthetic oligonucleotide
  Target: APOC3; (-) strand; PAM type: YTN; PAM sequence: CTC
tcgaggagtacactaagaag

SEQ ID NO: 12155 - DNA, 20 bp, Artificial Sequence
  Description of Artificial Sequence: Synthetic oligonucleotide
  Target: APOC3; (-) strand; PAM type: YTN; PAM sequence: CTG
agcgctctcgaggagtacac

SEQ ID NO: 12156 - DNA, 20 bp, Artificial Sequence
  Description of Artificial Sequence: Synthetic oligonucleotide
  Target: APOC3; (-) strand; PAM type: YTN; PAM sequence: TTC
ctgagcgctctcgaggagta

SEQ ID NO: 12157 - DNA, 20 bp, Artificial Sequence
  Description of Artificial Sequence: Synthetic oligonucleotide
  Target: APOC3; (-) strand; PAM type: YTN; PAM sequence: CTT
cctgagcgctctcgaggagt

SEQ ID NO: 12158 - DNA, 20 bp, Artificial Sequence
  Description of Artificial Sequence: Synthetic oligonucleotide
  Target: APOC3; (-) strand; PAM type: YTN; PAM sequence: TTC
aaggtcagcttcctgagcgc

SEQ ID NO: 12159 - DNA, 20 bp, Artificial Sequence
  Description of Artificial Sequence: Synthetic oligonucleotide
  Target: APOC3; (-) strand; PAM type: YTN; PAM sequence: CTT
caaggtcagcttcctgagcg

SEQ ID NO: 12160 - DNA, 20 bp, Artificial Sequence
  Description of Artificial Sequence: Synthetic oligonucleotide
  Target: APOC3; (-) strand; PAM type: YTN; PAM sequence: CTG
gagagcttcaaggtcagctt

SEQ ID NO: 12161 - DNA, 20 bp, Artificial Sequence
  Description of Artificial Sequence: Synthetic oligonucleotide
  Target: APOC3; (-) strand; PAM type: YTN; PAM sequence: CTG
cccgtgctggagagcttcaa

SEQ ID NO: 12162 - DNA, 20 bp, Artificial Sequence
  Description of Artificial Sequence: Synthetic oligonucleotide
  Target: APOC3; (-) strand; PAM type: YTN; PAM sequence: CTG
ctgcccgtgctggagagctt

SEQ ID NO: 12163 - DNA, 20 bp, Artificial Sequence
  Description of Artificial Sequence: Synthetic oligonucleotide
  Target: APOC3; (-) strand; PAM type: YTN; PAM sequence: CTC
cgccaaggcctgctgcccgt

SEQ ID NO: 12164 - DNA, 20 bp, Artificial Sequence
  Description of Artificial Sequence: Synthetic oligonucleotide
  Target: APOC3; (-) strand; PAM type: YTN; PAM sequence: CTC
gaggacctccgccaaggcct

SEQ ID NO: 12165 - DNA, 20 bp, Artificial Sequence
  Description of Artificial Sequence: Synthetic oligonucleotide
  Target: APOC3; (-) strand; PAM type: YTN; PAM sequence: CTC
agcgagaaggccaagcccgc

SEQ ID NO: 12166 - DNA, 20 bp, Artificial Sequence
  Description of Artificial Sequence: Synthetic oligonucleotide
  Target: APOC3; (-) strand; PAM type: YTN; PAM sequence: CTG
agcacgctcagcgagaaggc

SEQ ID NO: 12167 - DNA, 20 bp, Artificial Sequence
  Description of Artificial Sequence: Synthetic oligonucleotide
  Target: APOC3; (-) strand; PAM type: YTN; PAM sequence: CTG
gccgagtaccacgccaaggc

SEQ ID NO: 12168 - DNA, 20 bp, Artificial Sequence
  Description of Artificial Sequence: Synthetic oligonucleotide
  Target: APOC3; (-) strand; PAM type: YTN; PAM sequence: CTC
aaggagaacggcggcgccag

SEQ ID NO: 12169 - DNA, 20 bp, Artificial Sequence
  Description of Artificial Sequence: Synthetic oligonucleotide
  Target: APOC3; (-) strand; PAM type: YTN; PAM sequence: CTC
tcaaggagaacggcggcgcc

SEQ ID NO: 12170 - DNA, 20 bp, Artificial Sequence
  Description of Artificial Sequence: Synthetic oligonucleotide
  Target: APOC3; (-) strand; PAM type: YTN; PAM sequence: TTG
aggctctcaaggagaacggc

SEQ ID NO: 12171 - DNA, 20 bp, Artificial Sequence
  Description of Artificial Sequence: Synthetic oligonucleotide
  Target: APOC3; (-) strand; PAM type: YTN; PAM sequence: CTT
gaggctctcaaggagaacgg

SEQ ID NO: 12172 - DNA, 20 bp, Artificial Sequence
  Description of Artificial Sequence: Synthetic oligonucleotide
  Target: APOC3; (-) strand; PAM type: YTN; PAM sequence: TTG
gccgcgcgccttgaggctct

SEQ ID NO: 12173 - DNA, 20 bp, Artificial Sequence
  Description of Artificial Sequence: Synthetic oligonucleotide
  Target: APOC3; (-) strand; PAM type: YTN; PAM sequence: CTT
ggccgcgcgccttgaggctc

SEQ ID NO: 12174 - DNA, 20 bp, Artificial Sequence
  Description of Artificial Sequence: Synthetic oligonucleotide
  Target: APOC3; (-) strand; PAM type: YTN; PAM sequence: CTG
cgccagcgcttggccgcgcg

SEQ ID NO: 12175 - DNA, 20 bp, Artificial Sequence
  Description of Artificial Sequence: Synthetic oligonucleotide
  Target: APOC3; (-) strand; PAM type: YTN; PAM sequence: CTA
cagcgacgagctgcgccagc

SEQ ID NO: 12176 - DNA, 20 bp, Artificial Sequence
  Description of Artificial Sequence: Synthetic oligonucleotide
  Target: APOC3; (-) strand; PAM type: YTN; PAM sequence: CTG
gccccctacagcgacgagct

SEQ ID NO: 12177 - DNA, 20 bp, Artificial Sequence
  Description of Artificial Sequence: Synthetic oligonucleotide
  Target: APOC3; (-) strand; PAM type: YTN; PAM sequence: CTG
cgcacgcatctggcccccta

SEQ ID NO: 12178 - DNA, 20 bp, Artificial Sequence
  Description of Artificial Sequence: Synthetic oligonucleotide
  Target: APOC3; (-) strand; PAM type: YTN; PAM sequence: CTG
ggcgaggagatgcgcgaccg

SEQ ID NO: 12179 - DNA, 20 bp, Artificial Sequence
  Description of Artificial Sequence: Synthetic oligonucleotide
  Target: APOC3; (-) strand; PAM type: YTN; PAM sequence: CTG
agcccactgggcgaggagat

SEQ ID NO: 12180 - DNA, 20 bp, Artificial Sequence
  Description of Artificial Sequence: Synthetic oligonucleotide
  Target: APOC3; (-) strand; PAM type: YTN; PAM sequence: CTG
caagagaagctgagcccact

SEQ ID NO: 12181 - DNA, 20 bp, Artificial Sequence
  Description of Artificial Sequence: Synthetic oligonucleotide
  Target: APOC3; (-) strand; PAM type: YTN; PAM sequence: CTG
cacgagctgcaagagaagct

SEQ ID NO: 12182 - DNA, 20 bp, Artificial Sequence
  Description of Artificial Sequence: Synthetic oligonucleotide
  Target: APOC3; (-) strand; PAM type: YTN; PAM sequence: CTC
caagagggcgcgcgccagaa

SEQ ID NO: 12183 - DNA, 20 bp, Artificial Sequence
  Description of Artificial Sequence: Synthetic oligonucleotide
  Target: APOC3; (-) strand; PAM type: YTN; PAM sequence: CTG
cgcgcagagctccaagaggg

SEQ ID NO: 12184 - DNA, 20 bp, Artificial Sequence
  Description of Artificial Sequence: Synthetic oligonucleotide
  Target: APOC3; (-) strand; PAM type: YTN; PAM sequence: CTA
ccgccagaaggtggagccgc

SEQ ID NO: 12185 - DNA, 20 bp, Artificial Sequence
  Description of Artificial Sequence: Synthetic oligonucleotide
  Target: APOC3; (-) strand; PAM type: YTN; PAM sequence: CTC
taccgccagaaggtggagcc

SEQ ID NO: 12186 - DNA, 20 bp, Artificial Sequence
  Description of Artificial Sequence: Synthetic oligonucleotide
  Target: APOC3; (-) strand; PAM type: YTN; PAM sequence: TTC
cagaagaagtggcaggagga

SEQ ID NO: 12187 - DNA, 20 bp, Artificial Sequence
  Description of Artificial Sequence: Synthetic oligonucleotide
  Target: APOC3; (-) strand; PAM type: YTN; PAM sequence: CTT
ccagaagaagtggcaggagg

SEQ ID NO: 12188 - DNA, 20 bp, Artificial Sequence
  Description of Artificial Sequence: Synthetic oligonucleotide
  Target: APOC3; (-) strand; PAM type: YTN; PAM sequence: CTG
gacgacttccagaagaagtg

SEQ ID NO: 12189 - DNA, 20 bp, Artificial Sequence
  Description of Artificial Sequence: Synthetic oligonucleotide
  Target: APOC3; (-) strand; PAM type: YTN; PAM sequence: CTA
cctggacgacttccagaaga

SEQ ID NO: 12190 - DNA, 20 bp, Artificial Sequence
  Description of Artificial Sequence: Synthetic oligonucleotide
  Target: APOC3; (-) strand; PAM type: YTN; PAM sequence: CTG
gaggaggtgaaggccaaggt

SEQ ID NO: 12191 - DNA, 20 bp, Artificial Sequence
  Description of Artificial Sequence: Synthetic oligonucleotide
  Target: APOC3; (-) strand; PAM type: YTN; PAM sequence: CTG
aggcaggagatgagcaagga

SEQ ID NO: 12192 - DNA, 20 bp, Artificial Sequence
  Description of Artificial Sequence: Synthetic oligonucleotide
  Target: APOC3; (-) strand; PAM type: YTN; PAM sequence: CTG
gaaaaggagacagagggcct

SEQ ID NO: 12193 - DNA, 20 bp, Artificial Sequence
  Description of Artificial Sequence: Synthetic oligonucleotide
  Target: APOC3; (-) strand; PAM type: YTN; PAM sequence: CTG
ggataacctggaaaaggaga

SEQ ID NO: 12194 - DNA, 20 bp, Artificial Sequence
  Description of Artificial Sequence: Synthetic oligonucleotide
  Target: APOC3; (-) strand; PAM type: YTN; PAM sequence: TTC
tgggataacctggaaaagga

SEQ ID NO: 12195 - DNA, 20 bp, Artificial Sequence
  Description of Artificial Sequence: Synthetic oligonucleotide
  Target: APOC3; (-) strand; PAM type: YTN; PAM sequence: CTG
tgacccaggagttctgggat

SEQ ID NO: 12196 - DNA, 20 bp, Artificial Sequence
  Description of Artificial Sequence: Synthetic oligonucleotide
  Target: APOC3; (-) strand; PAM type: YTN; PAM sequence: CTC
ggccctgtgacccaggagtt

SEQ ID NO: 12197 - DNA, 20 bp, Artificial Sequence
  Description of Artificial Sequence: Synthetic oligonucleotide
  Target: APOC3; (-) strand; PAM type: YTN; PAM sequence: CTG
cgcgaacagctcggccctgt

SEQ ID NO: 12198 - DNA, 20 bp, Artificial Sequence
  Description of Artificial Sequence: Synthetic oligonucleotide
  Target: APOC3; (-) strand; PAM type: YTN; PAM sequence: TTC
agcaagctgcgcgaacagct

SEQ ID NO: 12199 - DNA, 20 bp, Artificial Sequence
  Description of Artificial Sequence: Synthetic oligonucleotide
  Target: APOC3; (-) strand; PAM type: YTN; PAM sequence: CTT
cagcaagctgcgcgaacagc

SEQ ID NO: 12200 - DNA, 20 bp, Artificial Sequence
  Description of Artificial Sequence: Synthetic oligonucleotide
  Target: APOC3; (-) strand; PAM type: YTN; PAM sequence: CTC
caccttcagcaagctgcgcg

SEQ ID NO: 12201 - DNA, 20 bp, Artificial Sequence
  Description of Artificial Sequence: Synthetic oligonucleotide
  Target: APOC3; (-) strand; PAM type: YTN; PAM sequence: CTG
ggacagcgtgacctccacct

SEQ ID NO: 12202 - DNA, 20 bp, Artificial Sequence
  Description of Artificial Sequence: Synthetic oligonucleotide
  Target: APOC3; (-) strand; PAM type: YTN; PAM sequence: TTG
acaactgggacagcgtgacc

SEQ ID NO: 12203 - DNA, 20 bp, Artificial Sequence
  Description of Artificial Sequence: Synthetic oligonucleotide
  Target: APOC3; (-) strand; PAM type: YTN; PAM sequence: CTT
gacaactgggacagcgtgac

SEQ ID NO: 12204 - DNA, 20 bp, Artificial Sequence
  Description of Artificial Sequence: Synthetic oligonucleotide
  Target: APOC3; (-) strand; PAM type: YTN; PAM sequence: CTC
cttgacaactgggacagcgt

SEQ ID NO: 12205 - DNA, 20 bp, Artificial Sequence
  Description of Artificial Sequence: Synthetic oligonucleotide
  Target: APOC3; (-) strand; PAM type: YTN; PAM sequence: CTA
aagctccttgacaactggga

SEQ ID NO: 12206 - DNA, 20 bp, Artificial Sequence
  Description of Artificial Sequence: Synthetic oligonucleotide
  Target: APOC3; (-) strand; PAM type: YTN; PAM sequence: CTC
cagcctaaagctccttgaca

SEQ ID NO: 12207 - DNA, 20 bp, Artificial Sequence
  Description of Artificial Sequence: Synthetic oligonucleotide
  Target: APOC3; (-) strand; PAM type: YTN; PAM sequence: CTC
accctccagcctaaagctcc

SEQ ID NO: 12208 - DNA, 20 bp, Artificial Sequence
  Description of Artificial Sequence: Synthetic oligonucleotide
  Target: APOC3; (-) strand; PAM type: YTN; PAM sequence: CTG
tctcaccctccagcctaaag

SEQ ID NO: 12209 - DNA, 20 bp, Artificial Sequence
  Description of Artificial Sequence: Synthetic oligonucleotide
  Target: APOC3; (-) strand; PAM type: YTN; PAM sequence: TTC
tgtctcaccctccagcctaa

SEQ ID NO: 12210 - DNA, 20 bp, Artificial Sequence
  Description of Artificial Sequence: Synthetic oligonucleotide
  Target: APOC3; (-) strand; PAM type: YTN; PAM sequence: CTT
ctgtctcaccctccagccta

SEQ ID NO: 12211 - DNA, 20 bp, Artificial Sequence
  Description of Artificial Sequence: Synthetic oligonucleotide
  Target: APOC3; (-) strand; PAM type: YTN; PAM sequence: CTC
aacccttctgtctcaccctc

SEQ ID NO: 12212 - DNA, 20 bp, Artificial Sequence
  Description of Artificial Sequence: Synthetic oligonucleotide
  Target: APOC3; (-) strand; PAM type: YTN; PAM sequence: CTG
ggaggccagccctcaaccct

SEQ ID NO: 12213 - DNA, 20 bp, Artificial Sequence
  Description of Artificial Sequence: Synthetic oligonucleotide
  Target: APOC3; (-) strand; PAM type: YTN; PAM sequence: CTG
gggcgctgggaggccagccc

SEQ ID NO: 12214 - DNA, 20 bp, Artificial Sequence
  Description of Artificial Sequence: Synthetic oligonucleotide
  Target: APOC3; (-) strand; PAM type: YTN; PAM sequence: CTG
ataggctggggcgctgggag

SEQ ID NO: 12215 - DNA, 20 bp, Artificial Sequence
  Description of Artificial Sequence: Synthetic oligonucleotide
  Target: APOC3; (-) strand; PAM type: YTN; PAM sequence: CTC
acccctgataggctggggcg

SEQ ID NO: 12216 - DNA, 20 bp, Artificial Sequence
  Description of Artificial Sequence: Synthetic oligonucleotide
  Target: APOC3; (-) strand; PAM type: YTN; PAM sequence: CTC
cgcggacaggtgtcacccag

SEQ ID NO: 12217 - DNA, 20 bp, Artificial Sequence
  Description of Artificial Sequence: Synthetic oligonucleotide
  Target: APOC3; (-) strand; PAM type: YTN; PAM sequence: CTG
cacctccgcggacaggtgtc

SEQ ID NO: 12218 - DNA, 20 bp, Artificial Sequence
  Description of Artificial Sequence: Synthetic oligonucleotide
  Target: APOC3; (-) strand; PAM type: YTN; PAM sequence: CTA
ggccactgcacctccgcgga

SEQ ID NO: 12219 - DNA, 20 bp, Artificial Sequence
  Description of Artificial Sequence: Synthetic oligonucleotide
  Target: APOC3; (-) strand; PAM type: YTN; PAM sequence: CTG
gaaatgctaggccactgcac

SEQ ID NO: 12220 - DNA, 20 bp, Artificial Sequence
  Description of Artificial Sequence: Synthetic oligonucleotide
  Target: APOC3; (-) strand; PAM type: YTN; PAM sequence: TTG
agagtgtactggaaatgcta

SEQ ID NO: 12221 - DNA, 20 bp, Artificial Sequence
  Description of Artificial Sequence: Synthetic oligonucleotide
  Target: APOC3; (-) strand; PAM type: YTN; PAM sequence: TTG
gttgagagtgtactggaaat

SEQ ID NO: 12222 - DNA, 20 bp, Artificial Sequence
  Description of Artificial Sequence: Synthetic oligonucleotide
  Target: APOC3; (-) strand; PAM type: YTN; PAM sequence: CTG
gcggggcaggggtgttggtt

SEQ ID NO: 12223 - DNA, 20 bp, Artificial Sequence
  Description of Artificial Sequence: Synthetic oligonucleotide
  Target: APOC3; (-) strand; PAM type: YTN; PAM sequence: CTG
cacaacggggcatggcctgg

SEQ ID NO: 12224 - DNA, 20 bp, Artificial Sequence
  Description of Artificial Sequence: Synthetic oligonucleotide
  Target: APOC3; (-) strand; PAM type: YTN; PAM sequence: CTC
ggtccagctgcacaacgggg

SEQ ID NO: 12225 - DNA, 20 bp, Artificial Sequence
  Description of Artificial Sequence: Synthetic oligonucleotide
  Target: APOC3; (-) strand; PAM type: YTN; PAM sequence: CTG
tgcctcggtccagctgcaca

SEQ ID NO: 12226 - DNA, 20 bp, Artificial Sequence
  Description of Artificial Sequence: Synthetic oligonucleotide
  Target: APOC3; (-) strand; PAM type: YTN; PAM sequence: CTC
tgtgcctcggtccagctgca

SEQ ID NO: 12227 - DNA, 20 bp, Artificial Sequence
  Description of Artificial Sequence: Synthetic oligonucleotide
  Target: APOC3; (-) strand; PAM type: YTN; PAM sequence: CTC
tctgtgcctcggtccagctg

SEQ ID NO: 12228 - DNA, 20 bp, Artificial Sequence
  Description of Artificial Sequence: Synthetic oligonucleotide
  Target: APOC3; (-) strand; PAM type: YTN; PAM sequence: CTC
ctctctgtgcctcggtccag

SEQ ID NO: 12229 - DNA, 20 bp, Artificial Sequence
  Description of Artificial Sequence: Synthetic oligonucleotide
  Target: APOC3; (-) strand; PAM type: YTN; PAM sequence: TTA
gctcctctctgtgcctcggt

SEQ ID NO: 12230 - DNA, 20 bp, Artificial Sequence
  Description of Artificial Sequence: Synthetic oligonucleotide
  Target: APOC3; (-) strand; PAM type: YTN; PAM sequence: TTT
agctcctctctgtgcctcgg

SEQ ID NO: 12231 - DNA, 20 bp, Artificial Sequence
  Description of Artificial Sequence: Synthetic oligonucleotide
  Target: APOC3; (-) strand; PAM type: YTN; PAM sequence: TTT
tagctcctctctgtgcctcg

SEQ ID NO: 12232 - DNA, 20 bp, Artificial Sequence
  Description of Artificial Sequence: Synthetic oligonucleotide
  Target: APOC3; (-) strand; PAM type: YTN; PAM sequence: TTT
ttagctcctctctgtgcctc

SEQ ID NO: 12233 - DNA, 20 bp, Artificial Sequence
  Description of Artificial Sequence: Synthetic oligonucleotide
  Target: APOC3; (-) strand; PAM type: YTN; PAM sequence: CTT
tttagctcctctctgtgcct

SEQ ID NO: 12234 - DNA, 20 bp, Artificial Sequence
  Description of Artificial Sequence: Synthetic oligonucleotide
  Target: APOC3; (-) strand; PAM type: YTN; PAM sequence: CTC
ctttttagctcctctctgtg

SEQ ID NO: 12235 - DNA, 20 bp, Artificial Sequence
  Description of Artificial Sequence: Synthetic oligonucleotide
  Target: APOC3; (-) strand; PAM type: YTN; PAM sequence: CTG
tctcctttttagctcctctc

SEQ ID NO: 12236 - DNA, 20 bp, Artificial Sequence
  Description of Artificial Sequence: Synthetic oligonucleotide
  Target: APOC3; (-) strand; PAM type: YTN; PAM sequence: CTC
tgtctcctttttagctcctc

SEQ ID NO: 12237 - DNA, 20 bp, Artificial Sequence
  Description of Artificial Sequence: Synthetic oligonucleotide
  Target: APOC3; (-) strand; PAM type: YTN; PAM sequence: CTA
gtcccagctctgtctccttt

SEQ ID NO: 12238 - DNA, 20 bp, Artificial Sequence
  Description of Artificial Sequence: Synthetic oligonucleotide
  Target: APOC3; (-) strand; PAM type: YTN; PAM sequence: CTG
ggcactagtcccagctctgt

SEQ ID NO: 12239 - DNA, 20 bp, Artificial Sequence
  Description of Artificial Sequence: Synthetic oligonucleotide
  Target: APOC3; (-) strand; PAM type: YTN; PAM sequence: TTG
gagaccaacgtaactgggca

SEQ ID NO: 12240 - DNA, 20 bp, Artificial Sequence
  Description of Artificial Sequence: Synthetic oligonucleotide
  Target: APOC3; (-) strand; PAM type: YTN; PAM sequence: TTT
ggagaccaacgtaactgggc

SEQ ID NO: 12241 - DNA, 20 bp, Artificial Sequence
  Description of Artificial Sequence: Synthetic oligonucleotide
  Target: APOC3; (-) strand; PAM type: YTN; PAM sequence: CTT
tggagaccaacgtaactggg

SEQ ID NO: 12242 - DNA, 20 bp, Artificial Sequence
  Description of Artificial Sequence: Synthetic oligonucleotide
  Target: APOC3; (-) strand; PAM type: YTN; PAM sequence: TTC
aagggcccactttggagacc

SEQ ID NO: 12243 - DNA, 20 bp, Artificial Sequence
  Description of Artificial Sequence: Synthetic oligonucleotide
  Target: APOC3; (-) strand; PAM type: YTN; PAM sequence: CTT
caagggcccactttggagac

SEQ ID NO: 12244 - DNA, 20 bp, Artificial Sequence
  Description of Artificial Sequence: Synthetic oligonucleotide
  Target: APOC3; (-) strand; PAM type: YTN; PAM sequence: CTG
gaggcatagaagcgaggtcc

SEQ ID NO: 12245 - DNA, 20 bp, Artificial Sequence
  Description of Artificial Sequence: Synthetic oligonucleotide
  Target: APOC3; (-) strand; PAM type: YTN; PAM sequence: TTC
ggagaggagaatgcgctgga

SEQ ID NO: 12246 - DNA, 20 bp, Artificial Sequence
  Description of Artificial Sequence: Synthetic oligonucleotide
  Target: APOC3; (-) strand; PAM type: YTN; PAM sequence: CTT
cggagaggagaatgcgctgg

SEQ ID NO: 12247 - DNA, 20 bp, Artificial Sequence
  Description of Artificial Sequence: Synthetic oligonucleotide
  Target: APOC3; (-) strand; PAM type: YTN; PAM sequence: CTG
tcttcggagaggagaatgcg

SEQ ID NO: 12248 - DNA, 20 bp, Artificial Sequence
  Description of Artificial Sequence: Synthetic oligonucleotide
  Target: APOC3; (-) strand; PAM type: YTN; PAM sequence: CTG
tgggctgtcttcggagagga

SEQ ID NO: 12249 - DNA, 20 bp, Artificial Sequence
  Description of Artificial Sequence: Synthetic oligonucleotide
  Target: APOC3; (-) strand; PAM type: YTN; PAM sequence: CTG
cccagcaagactgtgggctg

SEQ ID NO: 12250 - DNA, 20 bp, Artificial Sequence
  Description of Artificial Sequence: Synthetic oligonucleotide
  Target: APOC3; (-) strand; PAM type: YTN; PAM sequence: CTC
ctgcccagcaagactgtggg

SEQ ID NO: 12251 - DNA, 20 bp, Artificial Sequence
  Description of Artificial Sequence: Synthetic oligonucleotide
  Target: APOC3; (-) strand; PAM type: YTN; PAM sequence: CTG
ctcctgcccagcaagactgt

SEQ ID NO: 12252 - DNA, 20 bp, Artificial Sequence
  Description of Artificial Sequence: Synthetic oligonucleotide
  Target: APOC3; (-) strand; PAM type: YTN; PAM sequence: CTC
tgctcctgcccagcaagact

SEQ ID NO: 12253 - DNA, 20 bp, Artificial Sequence
  Description of Artificial Sequence: Synthetic oligonucleotide
  Target: APOC3; (-) strand; PAM type: YTN; PAM sequence: CTC
ctctgctcctgcccagcaag

SEQ ID NO: 12254 - DNA, 20 bp, Artificial Sequence
  Description of Artificial Sequence: Synthetic oligonucleotide
  Target: APOC3; (-) strand; PAM type: YTN; PAM sequence: TTC
accacctcctctgctcctgc

SEQ ID NO: 12255 - DNA, 20 bp, Artificial Sequence
  Description of Artificial Sequence: Synthetic oligonucleotide
  Target: APOC3; (-) strand; PAM type: YTN; PAM sequence: CTT
caccacctcctctgctcctg

SEQ ID NO: 12256 - DNA, 20 bp, Artificial Sequence
  Description of Artificial Sequence: Synthetic oligonucleotide
  Target: APOC3; (-) strand; PAM type: YTN; PAM sequence: TTC
ttcaccacctcctctgctcc

SEQ ID NO: 12257 - DNA, 20 bp, Artificial Sequence
  Description of Artificial Sequence: Synthetic oligonucleotide
  Target: APOC3; (-) strand; PAM type: YTN; PAM sequence: CTT
cttcaccacctcctctgctc

SEQ ID NO: 12258 - DNA, 20 bp, Artificial Sequence
  Description of Artificial Sequence: Synthetic oligonucleotide
  Target: APOC3; (-) strand; PAM type: YTN; PAM sequence: TTC
ccttcttcaccacctcctct

SEQ ID NO: 12259 - DNA, 20 bp, Artificial Sequence
  Description of Artificial Sequence: Synthetic oligonucleotide
  Target: APOC3; (-) strand; PAM type: YTN; PAM sequence: TTT
cccttcttcaccacctcctc

SEQ ID NO: 12260 - DNA, 20 bp, Artificial Sequence
  Description of Artificial Sequence: Synthetic oligonucleotide
  Target: APOC3; (-) strand; PAM type: YTN; PAM sequence: CTT
tcccttcttcaccacctcct

SEQ ID NO: 12261 - DNA, 20 bp, Artificial Sequence
  Description of Artificial Sequence: Synthetic oligonucleotide
  Target: APOC3; (-) strand; PAM type: YTN; PAM sequence: CTG
caagtgtagcaagccccttt

SEQ ID NO: 12262 - DNA, 20 bp, Artificial Sequence
  Description of Artificial Sequence: Synthetic oligonucleotide
  Target: APOC3; (-) strand; PAM type: YTN; PAM sequence: TTG
tgcctgcaagtgtagcaagc

SEQ ID NO: 12263 - DNA, 20 bp, Artificial Sequence
  Description of Artificial Sequence: Synthetic oligonucleotide
  Target: APOC3; (-) strand; PAM type: YTN; PAM sequence: CTG
cccgatgcgtgatcacagag

SEQ ID NO: 12264 - DNA, 20 bp, Artificial Sequence
  Description of Artificial Sequence: Synthetic oligonucleotide
  Target: APOC3; (-) strand; PAM type: YTN; PAM sequence: CTG
caaaggacagaccagggctg

SEQ ID NO: 12265 - DNA, 20 bp, Artificial Sequence
  Description of Artificial Sequence: Synthetic oligonucleotide
  Target: APOC3; (-) strand; PAM type: YTN; PAM sequence: CTC
caggcagggtcacagcccat

SEQ ID NO: 12266 - DNA, 20 bp, Artificial Sequence
  Description of Artificial Sequence: Synthetic oligonucleotide
  Target: APOC3; (-) strand; PAM type: YTN; PAM sequence: CTG
gaatgggatctccaggcagg

SEQ ID NO: 12267 - DNA, 20 bp, Artificial Sequence
  Description of Artificial Sequence: Synthetic oligonucleotide
  Target: APOC3; (-) strand; PAM type: YTN; PAM sequence: CTG
gatggagaaactggaatggg

SEQ ID NO: 12268 - DNA, 20 bp, Artificial Sequence
  Description of Artificial Sequence: Synthetic oligonucleotide
  Target: APOC3; (-) strand; PAM type: YTN; PAM sequence: CTG
ggccccacagatggtctgga

SEQ ID NO: 12269 - DNA, 20 bp, Artificial Sequence
  Description of Artificial Sequence: Synthetic oligonucleotide
  Target: APOC3; (-) strand; PAM type: YTN; PAM sequence: CTG
atgagctgggccccacagat

SEQ ID NO: 12270 - DNA, 20 bp, Artificial Sequence
  Description of Artificial Sequence: Synthetic oligonucleotide
  Target: APOC3; (-) strand; PAM type: YTN; PAM sequence: CTA
atatctgatgagctgggccc

SEQ ID NO: 12271 - DNA, 20 bp, Artificial Sequence
  Description of Artificial Sequence: Synthetic oligonucleotide
  Target: APOC3; (-) strand; PAM type: YTN; PAM sequence: CTC
acctaatatctgatgagctg

SEQ ID NO: 12272 - DNA, 20 bp, Artificial Sequence
  Description of Artificial Sequence: Synthetic oligonucleotide
  Target: APOC3; (-) strand; PAM type: YTN; PAM sequence: CTG
gccgagtcctcacctaatat

SEQ ID NO: 12273 - DNA, 20 bp, Artificial Sequence
  Description of Artificial Sequence: Synthetic oligonucleotide
  Target: APOC3; (-) strand; PAM type: YTN; PAM sequence: TTG
aagccagactggccgagtcc

SEQ ID NO: 12274 - DNA, 20 bp, Artificial Sequence
  Description of Artificial Sequence: Synthetic oligonucleotide
  Target: APOC3; (-) strand; PAM type: YTN; PAM sequence: CTG
tgggatgatgttgaagccag

SEQ ID NO: 12275 - DNA, 20 bp, Artificial Sequence
  Description of Artificial Sequence: Synthetic oligonucleotide
  Target: APOC3; (-) strand; PAM type: YTN; PAM sequence: TTG
agggcaggggtagggggcag

SEQ ID NO: 12276 - DNA, 20 bp, Artificial Sequence
  Description of Artificial Sequence: Synthetic oligonucleotide
  Target: APOC3; (-) strand; PAM type: YTN; PAM sequence: CTG
gggttgagggcaggggtagg

SEQ ID NO: 12277 - DNA, 20 bp, Artificial Sequence
  Description of Artificial Sequence: Synthetic oligonucleotide
  Target: APOC3; (-) strand; PAM type: YTN; PAM sequence: CTA
aagtaaggacccagcctggg

SEQ ID NO: 12278 - DNA, 20 bp, Artificial Sequence
  Description of Artificial Sequence: Synthetic oligonucleotide
  Target: APOC3; (-) strand; PAM type: YTN; PAM sequence: TTG
ggaaaacagctaaagtaagg

SEQ ID NO: 12279 - DNA, 20 bp, Artificial Sequence
  Description of Artificial Sequence: Synthetic oligonucleotide
  Target: APOC3; (-) strand; PAM type: YTN; PAM sequence: CTT
gggaaaacagctaaagtaag

SEQ ID NO: 12280 - DNA, 20 bp, Artificial Sequence
  Description of Artificial Sequence: Synthetic oligonucleotide
  Target: APOC3; (-) strand; PAM type: YTN; PAM sequence: CTC
cgccttgggaaaacagctaa

SEQ ID NO: 12281 - DNA, 20 bp, Artificial Sequence
  Description of Artificial Sequence: Synthetic oligonucleotide
  Target: APOC3; (-) strand; PAM type: YTN; PAM sequence: TTG
aaggctccgccttgggaaaa

SEQ ID NO: 12282 - DNA, 20 bp, Artificial Sequence
  Description of Artificial Sequence: Synthetic oligonucleotide
  Target: APOC3; (-) strand; PAM type: YTN; PAM sequence: TTT
gaaggctccgccttgggaaa

SEQ ID NO: 12283 - DNA, 20 bp, Artificial Sequence
  Description of Artificial Sequence: Synthetic oligonucleotide
  Target: APOC3; (-) strand; PAM type: YTN; PAM sequence: CTA
tgtgtcccagtttgaaggct

SEQ ID NO: 12284 - DNA, 20 bp, Artificial Sequence
  Description of Artificial Sequence: Synthetic oligonucleotide
  Target: APOC3; (-) strand; PAM type: YTN; PAM sequence: CTC
aaagacagcggcagagacta

SEQ ID NO: 12285 - DNA, 20 bp, Artificial Sequence
  Description of Artificial Sequence: Synthetic oligonucleotide
  Target: APOC3; (-) strand; PAM type: YTN; PAM sequence: CTG
tgtacgtggatgtgctcaaa

SEQ ID NO: 12286 - DNA, 20 bp, Artificial Sequence
  Description of Artificial Sequence: Synthetic oligonucleotide
  Target: APOC3; (-) strand; PAM type: YTN; PAM sequence: CTG
gccactgtgtacgtggatgt

SEQ ID NO: 12287 - DNA, 20 bp, Artificial Sequence
  Description of Artificial Sequence: Synthetic oligonucleotide
  Target: APOC3; (-) strand; PAM type: YTN; PAM sequence: CTG
ggatcgagtgaaggacctgg

SEQ ID NO: 12288 - DNA, 20 bp, Artificial Sequence
  Description of Artificial Sequence: Synthetic oligonucleotide
  Target: APOC3; (-) strand; PAM type: YTN; PAM sequence: CTG
gcagcaagatgaaccccccc

SEQ ID NO: 12289 - DNA, 20 bp, Artificial Sequence
  Description of Artificial Sequence: Synthetic oligonucleotide
  Target: APOC3; (-) strand; PAM type: YTN; PAM sequence: TTC
tggcagcaagatgaaccccc

SEQ ID NO: 12290 - DNA, 20 bp, Artificial Sequence
  Description of Artificial Sequence: Synthetic oligonucleotide
  Target: APOC3; (-) strand; PAM type: YTN; PAM sequence: TTT
ctggcagcaagatgaacccc

SEQ ID NO: 12291 - DNA, 20 bp, Artificial Sequence
  Description of Artificial Sequence: Synthetic oligonucleotide
  Target: APOC3; (-) strand; PAM type: YTN; PAM sequence: CTC
ggcatttctggcagcaagat

SEQ ID NO: 12292 - DNA, 20 bp, Artificial Sequence
  Description of Artificial Sequence: Synthetic oligonucleotide
  Target: APOC3; (-) strand; PAM type: YTN; PAM sequence: CTC
agggagccaggctcggcatt

SEQ ID NO: 12293 - DNA, 20 bp, Artificial Sequence
  Description of Artificial Sequence: Synthetic oligonucleotide
  Target: APOC3; (-) strand; PAM type: YTN; PAM sequence: CTC
ccaccctcagggagccaggc

SEQ ID NO: 12294 - DNA, 20 bp, Artificial Sequence
  Description of Artificial Sequence: Synthetic oligonucleotide
  Target: APOC3; (-) strand; PAM type: YTN; PAM sequence: CTC
ccctcccaccctcagggagc

SEQ ID NO: 12295 - DNA, 20 bp, Artificial Sequence
  Description of Artificial Sequence: Synthetic oligonucleotide
  Target: APOC3; (-) strand; PAM type: YTN; PAM sequence: CTG
ggtctcccctcccaccctca

SEQ ID NO: 12296 - DNA, 20 bp, Artificial Sequence
  Description of Artificial Sequence: Synthetic oligonucleotide
  Target: APOC3; (-) strand; PAM type: YTN; PAM sequence: CTG
atctgggtctcccctcccac

SEQ ID NO: 12297 - DNA, 20 bp, Artificial Sequence
  Description of Artificial Sequence: Synthetic oligonucleotide
  Target: APOC3; (-) strand; PAM type: YTN; PAM sequence: CTG
gcctgatctgggtctcccct

SEQ ID NO: 12298 - DNA, 20 bp, Artificial Sequence
  Description of Artificial Sequence: Synthetic oligonucleotide
  Target: APOC3; (-) strand; PAM type: YTN; PAM sequence: CTC
agcccacagctggcctgatc

SEQ ID NO: 12299 - DNA, 20 bp, Artificial Sequence
  Description of Artificial Sequence: Synthetic oligonucleotide
  Target: APOC3; (-) strand; PAM type: YTN; PAM sequence: CTC
agatctcagcccacagctgg

SEQ ID NO: 12300 - DNA, 20 bp, Artificial Sequence
  Description of Artificial Sequence: Synthetic oligonucleotide
  Target: APOC3; (-) strand; PAM type: YTN; PAM sequence: TTC
ggctcagatctcagcccaca

SEQ ID NO: 12301 - DNA, 20 bp, Artificial Sequence
  Description of Artificial Sequence: Synthetic oligonucleotide
  Target: APOC3; (-) strand; PAM type: YTN; PAM sequence: TTT
cggctcagatctcagcccac

SEQ ID NO: 12302 - DNA, 20 bp, Artificial Sequence
  Description of Artificial Sequence: Synthetic oligonucleotide
  Target: APOC3; (-) strand; PAM type: YTN; PAM sequence: CTT
tcggctcagatctcagccca

SEQ ID NO: 12303 - DNA, 20 bp, Artificial Sequence
  Description of Artificial Sequence: Synthetic oligonucleotide
  Target: APOC3; (-) strand; PAM type: YTN; PAM sequence: TTG
gcctttcggctcagatctca

SEQ ID NO: 12304 - DNA, 20 bp, Artificial Sequence
  Description of Artificial Sequence: Synthetic oligonucleotide
  Target: APOC3; (-) strand; PAM type: YTN; PAM sequence: CTT
ggcctttcggctcagatctc

SEQ ID NO: 12305 - DNA, 20 bp, Artificial Sequence
  Description of Artificial Sequence: Synthetic oligonucleotide
  Target: APOC3; (-) strand; PAM type: YTN; PAM sequence: CTC
caagcttggcctttcggctc

SEQ ID NO: 12306 - DNA, 20 bp, Artificial Sequence
  Description of Artificial Sequence: Synthetic oligonucleotide
  Target: APOC3; (-) strand; PAM type: YTN; PAM sequence: CTC
ccccacctccaagcttggcc

SEQ ID NO: 12307 - DNA, 20 bp, Artificial Sequence
  Description of Artificial Sequence: Synthetic oligonucleotide
  Target: APOC3; (-) strand; PAM type: YTN; PAM sequence: CTC
tcccccacctccaagcttgg

SEQ ID NO: 12308 - DNA, 20 bp, Artificial Sequence
  Description of Artificial Sequence: Synthetic oligonucleotide
  Target: APOC3; (-) strand; PAM type: YTN; PAM sequence: CTG
gccccctctcccccacctcc

SEQ ID NO: 12309 - DNA, 20 bp, Artificial Sequence
  Description of Artificial Sequence: Synthetic oligonucleotide
  Target: APOC3; (-) strand; PAM type: YTN; PAM sequence: CTC
actggccccctctcccccac

SEQ ID NO: 12310 - DNA, 20 bp, Artificial Sequence
  Description of Artificial Sequence: Synthetic oligonucleotide
  Target: APOC3; (-) strand; PAM type: YTN; PAM sequence: TTC
tcactggccccctctccccc

SEQ ID NO: 12311 - DNA, 20 bp, Artificial Sequence
  Description of Artificial Sequence: Synthetic oligonucleotide
  Target: APOC3; (-) strand; PAM type: YTN; PAM sequence: TTT
ctcactggccccctctcccc

SEQ ID NO: 12312 - DNA, 20 bp, Artificial Sequence
  Description of Artificial Sequence: Synthetic oligonucleotide
  Target: APOC3; (-) strand; PAM type: YTN; PAM sequence: CTG
ggcagaggcagcaggtttct

SEQ ID NO: 12313 - DNA, 20 bp, Artificial Sequence
  Description of Artificial Sequence: Synthetic oligonucleotide
  Target: APOC3; (-) strand; PAM type: YTN; PAM sequence: CTC
ctgggcagaggcagcaggtt

SEQ ID NO: 12314 - DNA, 20 bp, Artificial Sequence
  Description of Artificial Sequence: Synthetic oligonucleotide
  Target: APOC3; (-) strand; PAM type: YTN; PAM sequence: CTA
aatccccgtggcccaccctc

SEQ ID NO: 12315 - DNA, 20 bp, Artificial Sequence
  Description of Artificial Sequence: Synthetic oligonucleotide
  Target: APOC3; (-) strand; PAM type: YTN; PAM sequence: CTC
cctaaatccccgtggcccac

SEQ ID NO: 12316 - DNA, 20 bp, Artificial Sequence
  Description of Artificial Sequence: Synthetic oligonucleotide
  Target: APOC3; (-) strand; PAM type: YTN; PAM sequence: TTC
tccctaaatccccgtggccc

SEQ ID NO: 12317 - DNA, 20 bp, Artificial Sequence
  Description of Artificial Sequence: Synthetic oligonucleotide
  Target: APOC3; (-) strand; PAM type: YTN; PAM sequence: TTT
ctccctaaatccccgtggcc

SEQ ID NO: 12318 - DNA, 20 bp, Artificial Sequence
  Description of Artificial Sequence: Synthetic oligonucleotide
  Target: APOC3; (-) strand; PAM type: YTN; PAM sequence: CTT
tctccctaaatccccgtggc

SEQ ID NO: 12319 - DNA, 20 bp, Artificial Sequence
  Description of Artificial Sequence: Synthetic oligonucleotide
  Target: APOC3; (-) strand; PAM type: YTN; PAM sequence: CTA
gggagccaaccatcgggggg

SEQ ID NO: 12320 - DNA, 20 bp, Artificial Sequence
  Description of Artificial Sequence: Synthetic oligonucleotide
  Target: APOC3; (-) strand; PAM type: YTN; PAM sequence: CTA
acctagggagccaaccatcg

SEQ ID NO: 12321 - DNA, 20 bp, Artificial Sequence
  Description of Artificial Sequence: Synthetic oligonucleotide
  Target: APOC3; (-) strand; PAM type: YTN; PAM sequence: CTG
acgggtaggtgtcccctaac

SEQ ID NO: 12322 - DNA, 20 bp, Artificial Sequence
  Description of Artificial Sequence: Synthetic oligonucleotide
  Target: APOC3; (-) strand; PAM type: YTN; PAM sequence: TTC
ctgacgggtaggtgtcccct

SEQ ID NO: 12323 - DNA, 20 bp, Artificial Sequence
  Description of Artificial Sequence: Synthetic oligonucleotide
  Target: APOC3; (-) strand; PAM type: YTN; PAM sequence: CTT
cctgacgggtaggtgtcccc

SEQ ID NO: 12324 - DNA, 20 bp, Artificial Sequence
  Description of Artificial Sequence: Synthetic oligonucleotide
  Target: APOC3; (-) strand; PAM type: YTN; PAM sequence: CTC
ttcctgacgggtaggtgtcc

SEQ ID NO: 12325 - DNA, 20 bp, Artificial Sequence
  Description of Artificial Sequence: Synthetic oligonucleotide
  Target: APOC3; (-) strand; PAM type: YTN; PAM sequence: TTG
gccgtgctcttcctgacggg

SEQ ID NO: 12326 - DNA, 20 bp, Artificial Sequence
  Description of Artificial Sequence: Synthetic oligonucleotide
  Target: APOC3; (-) strand; PAM type: YTN; PAM sequence: CTT
ggccgtgctcttcctgacgg

SEQ ID NO: 12327 - DNA, 20 bp, Artificial Sequence
  Description of Artificial Sequence: Synthetic oligonucleotide
  Target: APOC3; (-) strand; PAM type: YTN; PAM sequence: CTG
accttggccgtgctcttcct

SEQ ID NO: 12328 - DNA, 20 bp, Artificial Sequence
  Description of Artificial Sequence: Synthetic oligonucleotide
  Target: APOC3; (-) strand; PAM type: YTN; PAM sequence: CTG
cggtgctgaccttggccgtg

SEQ ID NO: 12329 - DNA, 20 bp, Artificial Sequence
  Description of Artificial Sequence: Synthetic oligonucleotide
  Target: APOC3; (-) strand; PAM type: YTN; PAM sequence: TTC
aggatgaaagctgcggtgct

SEQ ID NO: 12330 - DNA, 20 bp, Artificial Sequence
  Description of Artificial Sequence: Synthetic oligonucleotide
  Target: APOC3; (-) strand; PAM type: YTN; PAM sequence: CTT
caggatgaaagctgcggtgc

SEQ ID NO: 12331 - DNA, 20 bp, Artificial Sequence
  Description of Artificial Sequence: Synthetic oligonucleotide
  Target: APOC3; (-) strand; PAM type: YTN; PAM sequence: CTC
caggtcccccacggcccttc

SEQ ID NO: 12332 - DNA, 20 bp, Artificial Sequence
  Description of Artificial Sequence: Synthetic oligonucleotide
  Target: APOC3; (-) strand; PAM type: YTN; PAM sequence: CTC
ctccaggtcccccacggccc

SEQ ID NO: 12333 - DNA, 20 bp, Artificial Sequence
  Description of Artificial Sequence: Synthetic oligonucleotide
  Target: APOC3; (-) strand; PAM type: YTN; PAM sequence: TTC
tcctccaggtcccccacggc

SEQ ID NO: 12334 - DNA, 20 bp, Artificial Sequence
  Description of Artificial Sequence: Synthetic oligonucleotide
  Target: APOC3; (-) strand; PAM type: YTN; PAM sequence: CTT
ctcctccaggtcccccacgg

SEQ ID NO: 12335 - DNA, 20 bp, Artificial Sequence
  Description of Artificial Sequence: Synthetic oligonucleotide
  Target: APOC3; (-) strand; PAM type: YTN; PAM sequence: TTC
ttctcctccaggtcccccac

SEQ ID NO: 12336 - DNA, 20 bp, Artificial Sequence
  Description of Artificial Sequence: Synthetic oligonucleotide
  Target: APOC3; (-) strand; PAM type: YTN; PAM sequence: CTT
cttctcctccaggtccccca

SEQ ID NO: 12337 - DNA, 20 bp, Artificial Sequence
  Description of Artificial Sequence: Synthetic oligonucleotide
  Target: APOC3; (-) strand; PAM type: YTN; PAM sequence: CTC
agccaggcccttcttctcct

SEQ ID NO: 12338 - DNA, 20 bp, Artificial Sequence
  Description of Artificial Sequence: Synthetic oligonucleotide
  Target: APOC3; (-) strand; PAM type: YTN; PAM sequence: CTG
aaggcaccccactcagccag

SEQ ID NO: 12339 - DNA, 20 bp, Artificial Sequence
  Description of Artificial Sequence: Synthetic oligonucleotide
  Target: APOC3; (-) strand; PAM type: YTN; PAM sequence: CTG
catgctgaaggcaccccact

SEQ ID NO: 12340 - DNA, 20 bp, Artificial Sequence
  Description of Artificial Sequence: Synthetic oligonucleotide
  Target: APOC3; (-) strand; PAM type: YTN; PAM sequence: TTC
tgcatgctgaaggcacccca

SEQ ID NO: 12341 - DNA, 20 bp, Artificial Sequence
  Description of Artificial Sequence: Synthetic oligonucleotide
  Target: APOC3; (-) strand; PAM type: YTN; PAM sequence: CTT
ctgcatgctgaaggcacccc

SEQ ID NO: 12342 - DNA, 20 bp, Artificial Sequence
  Description of Artificial Sequence: Synthetic oligonucleotide
  Target: APOC3; (-) strand; PAM type: YTN; PAM sequence: CTG
caatgagtgggggagcacgg

SEQ ID NO: 12343 - DNA, 20 bp, Artificial Sequence
  Description of Artificial Sequence: Synthetic oligonucleotide
  Target: APOC3; (-) strand; PAM type: YTN; PAM sequence: CTG
gctgcaatgagtgggggagc

SEQ ID NO: 12344 - DNA, 20 bp, Artificial Sequence
  Description of Artificial Sequence: Synthetic oligonucleotide
  Target: APOC3; (-) strand; PAM type: YTN; PAM sequence: CTC
acctggctgcaatgagtggg

SEQ ID NO: 12345 - DNA, 20 bp, Artificial Sequence
  Description of Artificial Sequence: Synthetic oligonucleotide
  Target: APOC3; (-) strand; PAM type: YTN; PAM sequence: CTC
ctcacctggctgcaatgagt

SEQ ID NO: 12346 - DNA, 20 bp, Artificial Sequence
  Description of Artificial Sequence: Synthetic oligonucleotide
  Target: APOC3; (-) strand; PAM type: YTN; PAM sequence: TTC
tcctcacctggctgcaatga

SEQ ID NO: 12347 - DNA, 20 bp, Artificial Sequence
  Description of Artificial Sequence: Synthetic oligonucleotide
  Target: APOC3; (-) strand; PAM type: YTN; PAM sequence: CTT
ctcctcacctggctgcaatg

SEQ ID NO: 12348 - DNA, 20 bp, Artificial Sequence
  Description of Artificial Sequence: Synthetic oligonucleotide
  Target: APOC3; (-) strand; PAM type: YTN; PAM sequence: CTG
tgcccttctcctcacctggc

SEQ ID NO: 12349 - DNA, 20 bp, Artificial Sequence
  Description of Artificial Sequence: Synthetic oligonucleotide
  Target: APOC3; (-) strand; PAM type: YTN; PAM sequence: CTC
tgtgcccttctcctcacctg

SEQ ID NO: 12350 - DNA, 20 bp, Artificial Sequence
  Description of Artificial Sequence: Synthetic oligonucleotide
  Target: APOC3; (-) strand; PAM type: YTN; PAM sequence: CTC
ccgctctgtgcccttctcct

SEQ ID NO: 12351 - DNA, 20 bp, Artificial Sequence
  Description of Artificial Sequence: Synthetic oligonucleotide
  Target: APOC3; (-) strand; PAM type: YTN; PAM sequence: TTC
tcccgctctgtgcccttctc

SEQ ID NO: 12352 - DNA, 20 bp, Artificial Sequence
  Description of Artificial Sequence: Synthetic oligonucleotide
  Target: APOC3; (-) strand; PAM type: YTN; PAM sequence: CTT
ctcccgctctgtgcccttct

SEQ ID NO: 12353 - DNA, 20 bp, Artificial Sequence
  Description of Artificial Sequence: Synthetic oligonucleotide
  Target: APOC3; (-) strand; PAM type: YTN; PAM sequence: CTG
aggtcttctcccgctctgtg

SEQ ID NO: 12354 - DNA, 20 bp, Artificial Sequence
  Description of Artificial Sequence: Synthetic oligonucleotide
  Target: APOC3; (-) strand; PAM type: YTN; PAM sequence: CTG
ggtacctgaggtcttctccc

SEQ ID NO: 12355 - DNA, 20 bp, Artificial Sequence
  Description of Artificial Sequence: Synthetic oligonucleotide
  Target: APOC3; (-) strand; PAM type: YTN; PAM sequence: CTC
tgggtacctgaggtcttctc

SEQ ID NO: 12356 - DNA, 20 bp, Artificial Sequence
  Description of Artificial Sequence: Synthetic oligonucleotide
  Target: APOC3; (-) strand; PAM type: YTN; PAM sequence: TTG
ccccaggccgggcctctggg

SEQ ID NO: 12357 - DNA, 20 bp, Artificial Sequence
  Description of Artificial Sequence: Synthetic oligonucleotide
  Target: APOC3; (-) strand; PAM type: YTN; PAM sequence: CTT
gccccaggccgggcctctgg

SEQ ID NO: 12358 - DNA, 20 bp, Artificial Sequence
  Description of Artificial Sequence: Synthetic oligonucleotide
  Target: APOC3; (-) strand; PAM type: YTN; PAM sequence: TTC
aggccttgccccaggccggg

SEQ ID NO: 12359 - DNA, 20 bp, Artificial Sequence
  Description of Artificial Sequence: Synthetic oligonucleotide
  Target: APOC3; (-) strand; PAM type: YTN; PAM sequence: CTC
aaggttcaggccttgcccca

SEQ ID NO: 12360 - DNA, 20 bp, Artificial Sequence
  Description of Artificial Sequence: Synthetic oligonucleotide
  Target: APOC3; (-) strand; PAM type: YTN; PAM sequence: CTC
cccagctcaaggttcaggcc

SEQ ID NO: 12361 - DNA, 20 bp, Artificial Sequence
  Description of Artificial Sequence: Synthetic oligonucleotide
  Target: APOC3; (-) strand; PAM type: YTN; PAM sequence: CTG
gctccccagctcaaggttca

SEQ ID NO: 12362 - DNA, 20 bp, Artificial Sequence
  Description of Artificial Sequence: Synthetic oligonucleotide
  Target: APOC3; (-) strand; PAM type: YTN; PAM sequence: CTC
tggctccccagctcaaggtt

SEQ ID NO: 12363 - DNA, 20 bp, Artificial Sequence
  Description of Artificial Sequence: Synthetic oligonucleotide
  Target: APOC3; (-) strand; PAM type: YTN; PAM sequence: CTG
ccccggtcactctggctccc

SEQ ID NO: 12364 - DNA, 20 bp, Artificial Sequence
  Description of Artificial Sequence: Synthetic oligonucleotide
  Target: APOC3; (-) strand; PAM type: YTN; PAM sequence: CTG
cctgccccggtcactctggc

SEQ ID NO: 12365 - DNA, 20 bp, Artificial Sequence
  Description of Artificial Sequence: Synthetic oligonucleotide
  Target: APOC3; (-) strand; PAM type: YTN; PAM sequence: CTG
ctgcctgccccggtcactct

SEQ ID NO: 12366 - DNA, 20 bp, Artificial Sequence
  Description of Artificial Sequence: Synthetic oligonucleotide
  Target: APOC3; (-) strand; PAM type: YTN; PAM sequence: CTG
cgagaaggaggtgcgtcctg

SEQ ID NO: 12367 - DNA, 20 bp, Artificial Sequence
  Description of Artificial Sequence: Synthetic oligonucleotide
  Target: APOC3; (-) strand; PAM type: YTN; PAM sequence: TTA
gagactgcgagaaggaggtg

SEQ ID NO: 12368 - DNA, 20 bp, Artificial Sequence
  Description of Artificial Sequence: Synthetic oligonucleotide
  Target: APOC3; (-) strand; PAM type: YTN; PAM sequence: CTT
agagactgcgagaaggaggt

SEQ ID NO: 12369 - DNA, 20 bp, Artificial Sequence
  Description of Artificial Sequence: Synthetic oligonucleotide
  Target: APOC3; (-) strand; PAM type: YTN; PAM sequence: CTG
cttagagactgcgagaagga

SEQ ID NO: 12370 - DNA, 20 bp, Artificial Sequence
  Description of Artificial Sequence: Synthetic oligonucleotide
  Target: APOC3; (-) strand; PAM type: YTN; PAM sequence: CTG
gctgcttagagactgcgaga

SEQ ID NO: 12371 - DNA, 20 bp, Artificial Sequence
  Description of Artificial Sequence: Synthetic oligonucleotide
  Target: APOC3; (-) strand; PAM type: YTN; PAM sequence: CTG
caagagctggctgcttagag

SEQ ID NO: 12372 - DNA, 20 bp, Artificial Sequence
  Description of Artificial Sequence: Synthetic oligonucleotide
  Target: APOC3; (-) strand; PAM type: YTN; PAM sequence: CTG
cagacataaataggccctgc

SEQ ID NO: 12373 - DNA, 20 bp, Artificial Sequence
  Description of Artificial Sequence: Synthetic oligonucleotide
  Target: APOC3; (-) strand; PAM type: YTN; PAM sequence: CTG
gctgcagacataaataggcc

SEQ ID NO: 12374 - DNA, 20 bp, Artificial Sequence
  Description of Artificial Sequence: Synthetic oligonucleotide
  Target: APOC3; (-) strand; PAM type: YTN; PAM sequence: CTC
ccagcccagaccctggctgc

SEQ ID NO: 12375 - DNA, 20 bp, Artificial Sequence
  Description of Artificial Sequence: Synthetic oligonucleotide
  Target: APOC3; (-) strand; PAM type: YTN; PAM sequence: TTA
tcagcctcccagcccagacc

SEQ ID NO: 12376 - DNA, 20 bp, Artificial Sequence
  Description of Artificial Sequence: Synthetic oligonucleotide
  Target: APOC3; (-) strand; PAM type: YTN; PAM sequence: CTT
atcagcctcccagcccagac

SEQ ID NO: 12377 - DNA, 20 bp, Artificial Sequence
  Description of Artificial Sequence: Synthetic oligonucleotide
  Target: APOC3; (-) strand; PAM type: YTN; PAM sequence: CTG
ggcttatcagcctcccagcc

SEQ ID NO: 12378 - DNA, 20 bp, Artificial Sequence
  Description of Artificial Sequence: Synthetic oligonucleotide
  Target: APOC3; (-) strand; PAM type: YTN; PAM sequence: TTG
ccaggaccagtgagcagcaa

SEQ ID NO: 12379 - DNA, 20 bp, Artificial Sequence
  Description of Artificial Sequence: Synthetic oligonucleotide
  Target: APOC3; (-) strand; PAM type: YTN; PAM sequence: TTC
cacattgccaggaccagtga

SEQ ID NO: 12380 - DNA, 20 bp, Artificial Sequence
  Description of Artificial Sequence: Synthetic oligonucleotide
  Target: APOC3; (-) strand; PAM type: YTN; PAM sequence: TTA
agttccacattgccaggacc

SEQ ID NO: 12381 - DNA, 20 bp, Artificial Sequence
  Description of Artificial Sequence: Synthetic oligonucleotide
  Target: APOC3; (-) strand; PAM type: YTN; PAM sequence: CTT
aagttccacattgccaggac

SEQ ID NO: 12382 - DNA, 20 bp, Artificial Sequence
  Description of Artificial Sequence: Synthetic oligonucleotide
  Target: APOC3; (-) strand; PAM type: YTN; PAM sequence: CTC
ttaagttccacattgccagg

SEQ ID NO: 12383 - DNA, 20 bp, Artificial Sequence
  Description of Artificial Sequence: Synthetic oligonucleotide
  Target: APOC3; (-) strand; PAM type: YTN; PAM sequence: TTG
aactcttaagttccacattg

SEQ ID NO: 12384 - DNA, 20 bp, Artificial Sequence
  Description of Artificial Sequence: Synthetic oligonucleotide
  Target: APOC3; (-) strand; PAM type: YTN; PAM sequence: CTT
gaactcttaagttccacatt

SEQ ID NO: 12385 - DNA, 20 bp, Artificial Sequence
  Description of Artificial Sequence: Synthetic oligonucleotide
  Target: APOC3; (-) strand; PAM type: YTN; PAM sequence: CTG
atccttgaactcttaagttc

SEQ ID NO: 12386 - DNA, 20 bp, Artificial Sequence
  Description of Artificial Sequence: Synthetic oligonucleotide
  Target: APOC3; (-) strand; PAM type: YTN; PAM sequence: TTG
cccagccccagggacagagc

SEQ ID NO: 12387 - DNA, 20 bp, Artificial Sequence
  Description of Artificial Sequence: Synthetic oligonucleotide
  Target: APOC3; (-) strand; PAM type: YTN; PAM sequence: TTT
gcccagccccagggacagag

SEQ ID NO: 12388 - DNA, 20 bp, Artificial Sequence
  Description of Artificial Sequence: Synthetic oligonucleotide
  Target: APOC3; (-) strand; PAM type: YTN; PAM sequence: CTA
tttgcccagccccagggaca

SEQ ID NO: 12389 - DNA, 20 bp, Artificial Sequence
  Description of Artificial Sequence: Synthetic oligonucleotide
  Target: APOC3; (-) strand; PAM type: YTN; PAM sequence: CTC
tatttgcccagccccaggga

SEQ ID NO: 12390 - DNA, 20 bp, Artificial Sequence
  Description of Artificial Sequence: Synthetic oligonucleotide
  Target: APOC3; (-) strand; PAM type: YTN; PAM sequence: TTG
cccactctatttgcccagcc

SEQ ID NO: 12391 - DNA, 20 bp, Artificial Sequence
  Description of Artificial Sequence: Synthetic oligonucleotide
  Target: APOC3; (-) strand; PAM type: YTN; PAM sequence: TTT
gcccactctatttgcccagc

SEQ ID NO: 12392 - DNA, 20 bp, Artificial Sequence
  Description of Artificial Sequence: Synthetic oligonucleotide
  Target: APOC3; (-) strand; PAM type: YTN; PAM sequence: CTG
tttgcccactctatttgccc

SEQ ID NO: 12393 - DNA, 20 bp, Artificial Sequence
  Description of Artificial Sequence: Synthetic oligonucleotide
  Target: APOC3; (-) strand; PAM type: YTN; PAM sequence: TTG
ctgtttgcccactctatttg

SEQ ID NO: 12394 - DNA, 20 bp, Artificial Sequence
  Description of Artificial Sequence: Synthetic oligonucleotide
  Target: APOC3; (-) strand; PAM type: YTN; PAM sequence: CTT
gctgtttgcccactctattt

SEQ ID NO: 12395 - DNA, 20 bp, Artificial Sequence
  Description of Artificial Sequence: Synthetic oligonucleotide
  Target: APOC3; (-) strand; PAM type: YTN; PAM sequence: CTG
cagcccccgcagcttgctgt

SEQ ID NO: 12396 - DNA, 20 bp, Artificial Sequence
  Description of Artificial Sequence: Synthetic oligonucleotide
  Target: APOC3; (-) strand; PAM type: YTN; PAM sequence: CTG
ccctgcagcccccgcagctt

SEQ ID NO: 12397 - DNA, 20 bp, Artificial Sequence
  Description of Artificial Sequence: Synthetic oligonucleotide
  Target: APOC3; (-) strand; PAM type: YTN; PAM sequence: TTG
acccctgccctgcagccccc

SEQ ID NO: 12398 - DNA, 20 bp, Artificial Sequence
  Description of Artificial Sequence: Synthetic oligonucleotide
  Target: APOC3; (-) strand; PAM type: YTN; PAM sequence: CTT
gacccctgccctgcagcccc

SEQ ID NO: 12399 - DNA, 20 bp, Artificial Sequence
  Description of Artificial Sequence: Synthetic oligonucleotide
  Target: APOC3; (-) strand; PAM type: YTN; PAM sequence: CTG
aacccttgacccctgccctg

SEQ ID NO: 12400 - DNA, 20 bp, Artificial Sequence
  Description of Artificial Sequence: Synthetic oligonucleotide
  Target: APOC3; (-) strand; PAM type: YTN; PAM sequence: CTC
ccgcccccactgaacccttg

SEQ ID NO: 12401 - DNA, 20 bp, Artificial Sequence
  Description of Artificial Sequence: Synthetic oligonucleotide
  Target: APOC3; (-) strand; PAM type: YTN; PAM sequence: CTC
ccctcccgcccccactgaac

SEQ ID NO: 12402 - DNA, 20 bp, Artificial Sequence
  Description of Artificial Sequence: Synthetic oligonucleotide
  Target: APOC3; (-) strand; PAM type: YTN; PAM sequence: CTG
cagacactcccctcccgccc

SEQ ID NO: 12403 - DNA, 20 bp, Artificial Sequence
  Description of Artificial Sequence: Synthetic oligonucleotide
  Target: APOC3; (-) strand; PAM type: YTN; PAM sequence: CTG
caagcctgcagacactcccc

SEQ ID NO: 12404 - DNA, 20 bp, Artificial Sequence
  Description of Artificial Sequence: Synthetic oligonucleotide
  Target: APOC3; (-) strand; PAM type: YTN; PAM sequence: CTC
ccatggaggggaaggggatg

SEQ ID NO: 12405 - DNA, 20 bp, Artificial Sequence
  Description of Artificial Sequence: Synthetic oligonucleotide
  Target: APOC3; (-) strand; PAM type: YTN; PAM sequence: CTG
cccacacactcccatggagg

SEQ ID NO: 12406 - DNA, 20 bp, Artificial Sequence
  Description of Artificial Sequence: Synthetic oligonucleotide
  Target: APOC3; (-) strand; PAM type: YTN; PAM sequence: CTG
ccaacacaatggacaatggc

SEQ ID NO: 12407 - DNA, 20 bp, Artificial Sequence
  Description of Artificial Sequence: Synthetic oligonucleotide
  Target: APOC3; (-) strand; PAM type: YTN; PAM sequence: CTC
tgccaacacaatggacaatg

SEQ ID NO: 12408 - DNA, 20 bp, Artificial Sequence
  Description of Artificial Sequence: Synthetic oligonucleotide
  Target: APOC3; (-) strand; PAM type: YTN; PAM sequence: CTC
ctctgccaacacaatggaca

SEQ ID NO: 12409 - DNA, 20 bp, Artificial Sequence
  Description of Artificial Sequence: Synthetic oligonucleotide
  Target: APOC3; (-) strand; PAM type: YTN; PAM sequence: CTC
ccctcctctgccaacacaat

SEQ ID NO: 12410 - DNA, 20 bp, Artificial Sequence
  Description of Artificial Sequence: Synthetic oligonucleotide
  Target: APOC3; (-) strand; PAM type: YTN; PAM sequence: CTC
ccctcccctcctctgccaac

SEQ ID NO: 12411 - DNA, 20 bp, Artificial Sequence
  Description of Artificial Sequence: Synthetic oligonucleotide
  Target: APOC3; (-) strand; PAM type: YTN; PAM sequence: TTG
gtggaggagtcccagcgtcc

SEQ ID NO: 12412 - DNA, 20 bp, Artificial Sequence
  Description of Artificial Sequence: Synthetic oligonucleotide
  Target: APOC3; (-) strand; PAM type: YTN; PAM sequence: CTT
ggtggaggagtcccagcgtc

SEQ ID NO: 12413 - DNA, 20 bp, Artificial Sequence
  Description of Artificial Sequence: Synthetic oligonucleotide
  Target: APOC3; (-) strand; PAM type: YTN; PAM sequence: CTC
cttggtggaggagtcccagc

SEQ ID NO: 12414 - DNA, 20 bp, Artificial Sequence
  Description of Artificial Sequence: Synthetic oligonucleotide
  Target: APOC3; (-) strand; PAM type: YTN; PAM sequence: CTG
gtggtgggggaggcagtctc

SEQ ID NO: 12415 - DNA, 20 bp, Artificial Sequence
  Description of Artificial Sequence: Synthetic oligonucleotide
  Target: APOC3; (-) strand; PAM type: YTN; PAM sequence: CTG
gaatgctggtggtgggggag

SEQ ID NO: 12416 - DNA, 20 bp, Artificial Sequence
  Description of Artificial Sequence: Synthetic oligonucleotide
  Target: APOC3; (-) strand; PAM type: YTN; PAM sequence: CTC
cctggaatgctggtggtggg

SEQ ID NO: 12417 - DNA, 20 bp, Artificial Sequence
  Description of Artificial Sequence: Synthetic oligonucleotide
  Target: APOC3; (+) strand; PAM type: YTN; PAM sequence: TTC
acgccattctcctgcctcag

SEQ ID NO: 12418 - DNA, 20 bp, Artificial Sequence
  Description of Artificial Sequence: Synthetic oligonucleotide
  Target: APOC3; (+) strand; PAM type: YTN; PAM sequence: TTC
tcctgcctcagcctcccaag

SEQ ID NO: 12419 - DNA, 20 bp, Artificial Sequence
  Description of Artificial Sequence: Synthetic oligonucleotide
  Target: APOC3; (+) strand; PAM type: YTN; PAM sequence: CTC
ctgcctcagcctcccaagta

SEQ ID NO: 12420 - DNA, 20 bp, Artificial Sequence
  Description of Artificial Sequence: Synthetic oligonucleotide
  Target: APOC3; (+) strand; PAM type: YTN; PAM sequence: CTG
cctcagcctcccaagtagct

SEQ ID NO: 12421 - DNA, 20 bp, Artificial Sequence
  Description of Artificial Sequence: Synthetic oligonucleotide
  Target: APOC3; (+) strand; PAM type: YTN; PAM sequence: CTC
agcctcccaagtagctggga

SEQ ID NO: 12422 - DNA, 20 bp, Artificial Sequence
  Description of Artificial Sequence: Synthetic oligonucleotide
  Target: APOC3; (+) strand; PAM type: YTN; PAM sequence: CTC
ccaagtagctgggaccatag

SEQ ID NO: 12423 - DNA, 20 bp, Artificial Sequence
  Description of Artificial Sequence: Synthetic oligonucleotide
  Target: APOC3; (+) strand; PAM type: YTN; PAM sequence: CTG
ggaccataggcgcccgccac

SEQ ID NO: 12424 - DNA, 20 bp, Artificial Sequence
  Description of Artificial Sequence: Synthetic oligonucleotide
  Target: APOC3; (+) strand; PAM type: YTN; PAM sequence: CTA
atttttttttttttttttgt

SEQ ID NO: 12425 - DNA, 20 bp, Artificial Sequence
  Description of Artificial Sequence: Synthetic oligonucleotide
  Target: APOC3; (+) strand; PAM type: YTN; PAM sequence: TTT
ttttttttttttttgtattt

SEQ ID NO: 12426 - DNA, 20 bp, Artificial Sequence
  Description of Artificial Sequence: Synthetic oligonucleotide
  Target: APOC3; (+) strand; PAM type: YTN; PAM sequence: TTT
tttttttttttttgtatttt

SEQ ID NO: 12427 - DNA, 20 bp, Artificial Sequence
  Description of Artificial Sequence: Synthetic oligonucleotide
  Target: APOC3; (+) strand; PAM type: YTN; PAM sequence: TTT
ttttttttttttgtattttt

SEQ ID NO: 12428 - DNA, 20 bp, Artificial Sequence
  Description of Artificial Sequence: Synthetic oligonucleotide
  Target: APOC3; (+) strand; PAM type: YTN; PAM sequence: TTT
tttttttttttgtattttta

SEQ ID NO: 12429 - DNA, 20 bp, Artificial Sequence
  Description of Artificial Sequence: Synthetic oligonucleotide
  Target: APOC3; (+) strand; PAM type: YTN; PAM sequence: TTT
ttttttttttgtatttttag

SEQ ID NO: 12430 - DNA, 20 bp, Artificial Sequence
  Description of Artificial Sequence: Synthetic oligonucleotide
  Target: APOC3; (+) strand; PAM type: YTN; PAM sequence: TTT
tttttttttgtatttttagt

SEQ ID NO: 12431 - DNA, 20 bp, Artificial Sequence
  Description of Artificial Sequence: Synthetic oligonucleotide
  Target: APOC3; (+) strand; PAM type: YTN; PAM sequence: TTT
ttttttttgtatttttagta

SEQ ID NO: 12432 - DNA, 20 bp, Artificial Sequence
  Description of Artificial Sequence: Synthetic oligonucleotide
  Target: APOC3; (+) strand; PAM type: YTN; PAM sequence: TTT
tttttttgtatttttagtag

SEQ ID NO: 12433 - DNA, 20 bp, Artificial Sequence
  Description of Artificial Sequence: Synthetic oligonucleotide
  Target: APOC3; (+) strand; PAM type: YTN; PAM sequence: TTT
ttttttgtatttttagtaga

SEQ ID NO: 12434 - DNA, 20 bp, Artificial Sequence
  Description of Artificial Sequence: Synthetic oligonucleotide
  Target: APOC3; (+) strand; PAM type: YTN; PAM sequence: TTT
tttttgtatttttagtagag

SEQ ID NO: 12435 - DNA, 20 bp, Artificial Sequence
  Description of Artificial Sequence: Synthetic oligonucleotide
  Target: APOC3; (+) strand; PAM type: YTN; PAM sequence: TTT
ttttgtatttttagtagaga

SEQ ID NO: 12436 - DNA, 20 bp, Artificial Sequence
  Description of Artificial Sequence: Synthetic oligonucleotide
  Target: APOC3; (+) strand; PAM type: YTN; PAM sequence: TTT
tttgtatttttagtagagat

SEQ ID NO: 12437 - DNA, 20 bp, Artificial Sequence
  Description of Artificial Sequence: Synthetic oligonucleotide
  Target: APOC3; (+) strand; PAM type: YTN; PAM sequence: TTT
ttgtatttttagtagagatg

SEQ ID NO: 12438 - DNA, 20 bp, Artificial Sequence
  Description of Artificial Sequence: Synthetic oligonucleotide
  Target: APOC3; (+) strand; PAM type: YTN; PAM sequence: TTT
tgtatttttagtagagatgg

SEQ ID NO: 12439 - DNA, 20 bp, Artificial Sequence
  Description of Artificial Sequence: Synthetic oligonucleotide
  Target: APOC3; (+) strand; PAM type: YTN; PAM sequence: TTT
gtatttttagtagagatggg

SEQ ID NO: 12440 - DNA, 20 bp, Artificial Sequence
  Description of Artificial Sequence: Synthetic oligonucleotide
  Target: APOC3; (+) strand; PAM type: YTN; PAM sequence: TTG
tatttttagtagagatgggg

SEQ ID NO: 12441 - DNA, 20 bp, Artificial Sequence
  Description of Artificial Sequence: Synthetic oligonucleotide
  Target: APOC3; (+) strand; PAM type: YTN; PAM sequence: TTT
ttagtagagatggggtttcg

SEQ ID NO: 12442 - DNA, 20 bp, Artificial Sequence
  Description of Artificial Sequence: Synthetic oligonucleotide
  Target: APOC3; (+) strand; PAM type: YTN; PAM sequence: TTT
tagtagagatggggtttcgc

SEQ ID NO: 12443 - DNA, 20 bp, Artificial Sequence
  Description of Artificial Sequence: Synthetic oligonucleotide
  Target: APOC3; (+) strand; PAM type: YTN; PAM sequence: TTT
agtagagatggggtttcgcc

SEQ ID NO: 12444 - DNA, 20 bp, Artificial Sequence
  Description of Artificial Sequence: Synthetic oligonucleotide
  Target: APOC3; (+) strand; PAM type: YTN; PAM sequence: TTA
gtagagatggggtttcgccg

SEQ ID NO: 12445 - DNA, 20 bp, Artificial Sequence
  Description of Artificial Sequence: Synthetic oligonucleotide
  Target: APOC3; (+) strand; PAM type: YTN; PAM sequence: TTT
cgccgtgttagccaggatgg

SEQ ID NO: 12446 - DNA, 20 bp, Artificial Sequence
  Description of Artificial Sequence: Synthetic oligonucleotide
  Target: APOC3; (+) strand; PAM type: YTN; PAM sequence: TTC
gccgtgttagccaggatggt

SEQ ID NO: 12447 - DNA, 20 bp, Artificial Sequence
  Description of Artificial Sequence: Synthetic oligonucleotide
  Target: APOC3; (+) strand; PAM type: YTN; PAM sequence: TTA
gccaggatggtctcgatctc

SEQ ID NO: 12448 - DNA, 20 bp, Artificial Sequence
  Description of Artificial Sequence: Synthetic oligonucleotide
  Target: APOC3; (+) strand; PAM type: YTN; PAM sequence: CTC
gatctcctgacctcgtgatc

SEQ ID NO: 12449 - DNA, 20 bp, Artificial Sequence
  Description of Artificial Sequence: Synthetic oligonucleotide
  Target: APOC3; (+) strand; PAM type: YTN; PAM sequence: CTC
ctgacctcgtgatccgcccg

SEQ ID NO: 12450 - DNA, 20 bp, Artificial Sequence
  Description of Artificial Sequence: Synthetic oligonucleotide
  Target: APOC3; (+) strand; PAM type: YTN; PAM sequence: CTG
acctcgtgatccgcccgcct

SEQ ID NO: 12451 - DNA, 20 bp, Artificial Sequence
  Description of Artificial Sequence: Synthetic oligonucleotide
  Target: APOC3; (+) strand; PAM type: YTN; PAM sequence: CTC
gtgatccgcccgcctcaacc

SEQ ID NO: 12452 - DNA, 20 bp, Artificial Sequence
  Description of Artificial Sequence: Synthetic oligonucleotide
  Target: APOC3; (+) strand; PAM type: YTN; PAM sequence: CTC
aacctcccaaagtgctgaga

SEQ ID NO: 12453 - DNA, 20 bp, Artificial Sequence
  Description of Artificial Sequence: Synthetic oligonucleotide
  Target: APOC3; (+) strand; PAM type: YTN; PAM sequence: CTC
ccaaagtgctgagattacag

SEQ ID NO: 12454 - DNA, 20 bp, Artificial Sequence
  Description of Artificial Sequence: Synthetic oligonucleotide
  Target: APOC3; (+) strand; PAM type: YTN; PAM sequence: CTG
agattacaggcgtgagccac

SEQ ID NO: 12455 - DNA, 20 bp, Artificial Sequence
  Description of Artificial Sequence: Synthetic oligonucleotide
  Target: APOC3; (+) strand; PAM type: YTN; PAM sequence: TTA
caggcgtgagccaccacgcc

SEQ ID NO: 12456 - DNA, 20 bp, Artificial Sequence
  Description of Artificial Sequence: Synthetic oligonucleotide
  Target: APOC3; (+) strand; PAM type: YTN; PAM sequence: CTA
aaaaattattttcaatccaa

SEQ ID NO: 12457 - DNA, 20 bp, Artificial Sequence
  Description of Artificial Sequence: Synthetic oligonucleotide
  Target: APOC3; (+) strand; PAM type: YTN; PAM sequence: TTA
ttttcaatccaaggttggtt

SEQ ID NO: 12458 - DNA, 20 bp, Artificial Sequence
  Description of Artificial Sequence: Synthetic oligonucleotide
  Target: APOC3; (+) strand; PAM type: YTN; PAM sequence: TTT
tcaatccaaggttggttgaa

SEQ ID NO: 12459 - DNA, 20 bp, Artificial Sequence
  Description of Artificial Sequence: Synthetic oligonucleotide
  Target: APOC3; (+) strand; PAM type: YTN; PAM sequence: TTT
caatccaaggttggttgaat

SEQ ID NO: 12460 - DNA, 20 bp, Artificial Sequence
  Description of Artificial Sequence: Synthetic oligonucleotide
  Target: APOC3; (+) strand; PAM type: YTN; PAM sequence: TTC
aatccaaggttggttgaatc

SEQ ID NO: 12461 - DNA, 20 bp, Artificial Sequence
  Description of Artificial Sequence: Synthetic oligonucleotide
  Target: APOC3; (+) strand; PAM type: YTN; PAM sequence: TTG
gttgaatccatggacacaga

SEQ ID NO: 12462 - DNA, 20 bp, Artificial Sequence
  Description of Artificial Sequence: Synthetic oligonucleotide
  Target: APOC3; (+) strand; PAM type: YTN; PAM sequence: TTG
aatccatggacacagaaacc

SEQ ID NO: 12463 - DNA, 20 bp, Artificial Sequence
  Description of Artificial Sequence: Synthetic oligonucleotide
  Target: APOC3; (+) strand; PAM type: YTN; PAM sequence: CTG
cctatagagctcctggcaca

SEQ ID NO: 12464 - DNA, 20 bp, Artificial Sequence
  Description of Artificial Sequence: Synthetic oligonucleotide
  Target: APOC3; (+) strand; PAM type: YTN; PAM sequence: CTA
tagagctcctggcacagagt

SEQ ID NO: 12465 - DNA, 20 bp, Artificial Sequence
  Description of Artificial Sequence: Synthetic oligonucleotide
  Target: APOC3; (+) strand; PAM type: YTN; PAM sequence: CTC
ctggcacagagtaagctctg

SEQ ID NO: 12466 - DNA, 20 bp, Artificial Sequence
  Description of Artificial Sequence: Synthetic oligonucleotide
  Target: APOC3; (+) strand; PAM type: YTN; PAM sequence: CTG
gcacagagtaagctctgaaa

SEQ ID NO: 12467 - DNA, 20 bp, Artificial Sequence
  Description of Artificial Sequence: Synthetic oligonucleotide
  Target: APOC3; (+) strand; PAM type: YTN; PAM sequence: CTC
tgaaaaatagttgctgttat

SEQ ID NO: 12468 - DNA, 20 bp, Artificial Sequence
  Description of Artificial Sequence: Synthetic oligonucleotide
  Target: APOC3; (+) strand; PAM type: YTN; PAM sequence: CTG
aaaaatagttgctgttatta

SEQ ID NO: 12469 - DNA, 20 bp, Artificial Sequence
  Description of Artificial Sequence: Synthetic oligonucleotide
  Target: APOC3; (+) strand; PAM type: YTN; PAM sequence: TTG
ctgttattataataatcata

SEQ ID NO: 12470 - DNA, 20 bp, Artificial Sequence
  Description of Artificial Sequence: Synthetic oligonucleotide
  Target: APOC3; (+) strand; PAM type: YTN; PAM sequence: CTG
ttattataataatcatactg

SEQ ID NO: 12471 - DNA, 20 bp, Artificial Sequence
  Description of Artificial Sequence: Synthetic oligonucleotide
  Target: APOC3; (+) strand; PAM type: YTN; PAM sequence: TTA
ttataataatcatactgtat

SEQ ID NO: 12472 - DNA, 20 bp, Artificial Sequence
  Description of Artificial Sequence: Synthetic oligonucleotide
  Target: APOC3; (+) strand; PAM type: YTN; PAM sequence: TTA
taataatcatactgtataat

SEQ ID NO: 12473 - DNA, 20 bp, Artificial Sequence
  Description of Artificial Sequence: Synthetic oligonucleotide
  Target: APOC3; (+) strand; PAM type: YTN; PAM sequence: CTG
tataataatcatactgtgtt

SEQ ID NO: 12474 - DNA, 20 bp, Artificial Sequence
  Description of Artificial Sequence: Synthetic oligonucleotide
  Target: APOC3; (+) strand; PAM type: YTN; PAM sequence: CTG
tgttcctgatttggagcaaa

SEQ ID NO: 12475 - DNA, 20 bp, Artificial Sequence
  Description of Artificial Sequence: Synthetic oligonucleotide
  Target: APOC3; (+) strand; PAM type: YTN; PAM sequence: TTC
ctgatttggagcaaagcagg

SEQ ID NO: 12476 - DNA, 20 bp, Artificial Sequence
  Description of Artificial Sequence: Synthetic oligonucleotide
  Target: APOC3; (+) strand; PAM type: YTN; PAM sequence: CTG
atttggagcaaagcagggag

SEQ ID NO: 12477 - DNA, 20 bp, Artificial Sequence
  Description of Artificial Sequence: Synthetic oligonucleotide
  Target: APOC3; (+) strand; PAM type: YTN; PAM sequence: TTT
ggagcaaagcagggagggta

SEQ ID NO: 12478 - DNA, 20 bp, Artificial Sequence
  Description of Artificial Sequence: Synthetic oligonucleotide
  Target: APOC3; (+) strand; PAM type: YTN; PAM sequence: TTG
gagcaaagcagggagggtag

SEQ ID NO: 12479 - DNA, 20 bp, Artificial Sequence
  Description of Artificial Sequence: Synthetic oligonucleotide
  Target: APOC3; (+) strand; PAM type: YTN; PAM sequence: CTC
cctcctctagtgagagtggc

SEQ ID NO: 12480 - DNA, 20 bp, Artificial Sequence
  Description of Artificial Sequence: Synthetic oligonucleotide
  Target: APOC3; (+) strand; PAM type: YTN; PAM sequence: CTC
ctctagtgagagtggcagag

SEQ ID NO: 12481 - DNA, 20 bp, Artificial Sequence
  Description of Artificial Sequence: Synthetic oligonucleotide
  Target: APOC3; (+) strand; PAM type: YTN; PAM sequence: CTC
tagtgagagtggcagagtga

SEQ ID NO: 12482 - DNA, 20 bp, Artificial Sequence
  Description of Artificial Sequence: Synthetic oligonucleotide
  Target: APOC3; (+) strand; PAM type: YTN; PAM sequence: CTA
gtgagagtggcagagtgaga

SEQ ID NO: 12483 - DNA, 20 bp, Artificial Sequence
  Description of Artificial Sequence: Synthetic oligonucleotide
  Target: APOC3; (+) strand; PAM type: YTN; PAM sequence: CTC
agccctctgaggggcgccag

SEQ ID NO: 12484 - DNA, 20 bp, Artificial Sequence
  Description of Artificial Sequence: Synthetic oligonucleotide
  Target: APOC3; (+) strand; PAM type: YTN; PAM sequence: CTC
tgaggggcgccaggtgggcc

SEQ ID NO: 12485 - DNA, 20 bp, Artificial Sequence
  Description of Artificial Sequence: Synthetic oligonucleotide
  Target: APOC3; (+) strand; PAM type: YTN; PAM sequence: CTG
aggggcgccaggtgggccag

SEQ ID NO: 12486 - DNA, 20 bp, Artificial Sequence
  Description of Artificial Sequence: Synthetic oligonucleotide
  Target: APOC3; (+) strand; PAM type: YTN; PAM sequence: CTG
aggcctgactcctgcccttc

SEQ ID NO: 12487 - DNA, 20 bp, Artificial Sequence
  Description of Artificial Sequence: Synthetic oligonucleotide
  Target: APOC3; (+) strand; PAM type: YTN; PAM sequence: CTG
actcctgcccttcttgcccc

SEQ ID NO: 12488 - DNA, 20 bp, Artificial Sequence
  Description of Artificial Sequence: Synthetic oligonucleotide
  Target: APOC3; (+) strand; PAM type: YTN; PAM sequence: CTC
ctgcccttcttgccccccag

SEQ ID NO: 12489 - DNA, 20 bp, Artificial Sequence
  Description of Artificial Sequence: Synthetic oligonucleotide
  Target: APOC3; (+) strand; PAM type: YTN; PAM sequence: CTG
cccttcttgccccccagcca

SEQ ID NO: 12490 - DNA, 20 bp, Artificial Sequence
  Description of Artificial Sequence: Synthetic oligonucleotide
  Target: APOC3; (+) strand; PAM type: YTN; PAM sequence: CTT
cttgccccccagccacactc

SEQ ID NO: 12491 - DNA, 20 bp, Artificial Sequence
  Description of Artificial Sequence: Synthetic oligonucleotide
  Target: APOC3; (+) strand; PAM type: YTN; PAM sequence: TTC
ttgccccccagccacactcc

SEQ ID NO: 12492 - DNA, 20 bp, Artificial Sequence
  Description of Artificial Sequence: Synthetic oligonucleotide
  Target: APOC3; (+) strand; PAM type: YTN; PAM sequence: CTT
gccccccagccacactccct

SEQ ID NO: 12493 - DNA, 20 bp, Artificial Sequence
  Description of Artificial Sequence: Synthetic oligonucleotide
  Target: APOC3; (+) strand; PAM type: YTN; PAM sequence: TTG
ccccccagccacactccctg

SEQ ID NO: 12494 - DNA, 20 bp, Artificial Sequence
  Description of Artificial Sequence: Synthetic oligonucleotide
  Target: APOC3; (+) strand; PAM type: YTN; PAM sequence: CTC
cctgggcaggagcagctggc

SEQ ID NO: 12495 - DNA, 20 bp, Artificial Sequence
  Description of Artificial Sequence: Synthetic oligonucleotide
  Target: APOC3; (+) strand; PAM type: YTN; PAM sequence: CTG
ggcaggagcagctggcttga

SEQ ID NO: 12496 - DNA, 20 bp, Artificial Sequence
  Description of Artificial Sequence: Synthetic oligonucleotide
  Target: APOC3; (+) strand; PAM type: YTN; PAM sequence: CTG
gcttgagcagaatcttggga

SEQ ID NO: 12497 - DNA, 20 bp, Artificial Sequence
  Description of Artificial Sequence: Synthetic oligonucleotide
  Target: APOC3; (+) strand; PAM type: YTN; PAM sequence: CTT
gagcagaatcttgggacctg

SEQ ID NO: 12498 - DNA, 20 bp, Artificial Sequence
  Description of Artificial Sequence: Synthetic oligonucleotide
  Target: APOC3; (+) strand; PAM type: YTN; PAM sequence: TTG
agcagaatcttgggacctga

SEQ ID NO: 12499 - DNA, 20 bp, Artificial Sequence
  Description of Artificial Sequence: Synthetic oligonucleotide
  Target: APOC3; (+) strand; PAM type: YTN; PAM sequence: CTT
gggacctgaggctctcaggg

SEQ ID NO: 12500 - DNA, 20 bp, Artificial Sequence
  Description of Artificial Sequence: Synthetic oligonucleotide
  Target: APOC3; (+) strand; PAM type: YTN; PAM sequence: TTG
ggacctgaggctctcagggg

SEQ ID NO: 12501 - DNA, 20 bp, Artificial Sequence
  Description of Artificial Sequence: Synthetic oligonucleotide
  Target: APOC3; (+) strand; PAM type: YTN; PAM sequence: CTG
aggctctcaggggacctccc

SEQ ID NO: 12502 - DNA, 20 bp, Artificial Sequence
  Description of Artificial Sequence: Synthetic oligonucleotide
  Target: APOC3; (+) strand; PAM type: YTN; PAM sequence: CTC
tcaggggacctcccattggg

SEQ ID NO: 12503 - DNA, 20 bp, Artificial Sequence
  Description of Artificial Sequence: Synthetic oligonucleotide
  Target: APOC3; (+) strand; PAM type: YTN; PAM sequence: CTC
aggggacctcccattggggg

SEQ ID NO: 12504 - DNA, 20 bp, Artificial Sequence
  Description of Artificial Sequence: Synthetic oligonucleotide
  Target: APOC3; (+) strand; PAM type: YTN; PAM sequence: CTC
ccattgggggatggagggca

SEQ ID NO: 12505 - DNA, 20 bp, Artificial Sequence
  Description of Artificial Sequence: Synthetic oligonucleotide
  Target: APOC3; (+) strand; PAM type: YTN; PAM sequence: TTG
ggggatggagggcaatggtg

SEQ ID NO: 12506 - DNA, 20 bp, Artificial Sequence
  Description of Artificial Sequence: Synthetic oligonucleotide
  Target: APOC3; (+) strand; PAM type: YTN; PAM sequence: CTT
ctacttagatgtctattgga

SEQ ID NO: 12507 - DNA, 20 bp, Artificial Sequence
  Description of Artificial Sequence: Synthetic oligonucleotide
  Target: APOC3; (+) strand; PAM type: YTN; PAM sequence: TTC
tacttagatgtctattggat

SEQ ID NO: 12508 - DNA, 20 bp, Artificial Sequence
  Description of Artificial Sequence: Synthetic oligonucleotide
  Target: APOC3; (+) strand; PAM type: YTN; PAM sequence: CTA
cttagatgtctattggatct

SEQ ID NO: 12509 - DNA, 20 bp, Artificial Sequence
  Description of Artificial Sequence: Synthetic oligonucleotide
  Target: APOC3; (+) strand; PAM type: YTN; PAM sequence: CTT
agatgtctattggatctcta

SEQ ID NO: 12510 - DNA, 20 bp, Artificial Sequence
  Description of Artificial Sequence: Synthetic oligonucleotide
  Target: APOC3; (+) strand; PAM type: YTN; PAM sequence: TTA
gatgtctattggatctctaa

SEQ ID NO: 12511 - DNA, 20 bp, Artificial Sequence
  Description of Artificial Sequence: Synthetic oligonucleotide
  Target: APOC3; (+) strand; PAM type: YTN; PAM sequence: CTA
ttggatctctaaatgaggct

SEQ ID NO: 12512 - DNA, 20 bp, Artificial Sequence
  Description of Artificial Sequence: Synthetic oligonucleotide
  Target: APOC3; (+) strand; PAM type: YTN; PAM sequence: TTG
gatctctaaatgaggctgca

SEQ ID NO: 12513 - DNA, 20 bp, Artificial Sequence
  Description of Artificial Sequence: Synthetic oligonucleotide
  Target: APOC3; (+) strand; PAM type: YTN; PAM sequence: CTC
taaatgaggctgcatgcata

SEQ ID NO: 12514 - DNA, 20 bp, Artificial Sequence
  Description of Artificial Sequence: Synthetic oligonucleotide
  Target: APOC3; (+) strand; PAM type: YTN; PAM sequence: CTA
aatgaggctgcatgcataat

SEQ ID NO: 12515 - DNA, 20 bp, Artificial Sequence
  Description of Artificial Sequence: Synthetic oligonucleotide
  Target: APOC3; (+) strand; PAM type: YTN; PAM sequence: CTG
catgcataatcacacacaaa

SEQ ID NO: 12516 - DNA, 20 bp, Artificial Sequence
  Description of Artificial Sequence: Synthetic oligonucleotide
  Target: APOC3; (+) strand; PAM type: YTN; PAM sequence: CTG
agaaggtgacacaccacgtc

SEQ ID NO: 12517 - DNA, 20 bp, Artificial Sequence
  Description of Artificial Sequence: Synthetic oligonucleotide
  Target: APOC3; (+) strand; PAM type: YTN; PAM sequence: CTC
tgccggaccacaccactcct

SEQ ID NO: 12518 - DNA, 20 bp, Artificial Sequence
  Description of Artificial Sequence: Synthetic oligonucleotide
  Target: APOC3; (+) strand; PAM type: YTN; PAM sequence: CTG
ccggaccacaccactcctag

SEQ ID NO: 12519 - DNA, 20 bp, Artificial Sequence
  Description of Artificial Sequence: Synthetic oligonucleotide
  Target: APOC3; (+) strand; PAM type: YTN; PAM sequence: CTC
ctagtgactatgaggtgaca

SEQ ID NO: 12520 - DNA, 20 bp, Artificial Sequence
  Description of Artificial Sequence: Synthetic oligonucleotide
  Target: APOC3; (+) strand; PAM type: YTN; PAM sequence: CTA
gtgactatgaggtgacatcc

SEQ ID NO: 12521 - DNA, 20 bp, Artificial Sequence
  Description of Artificial Sequence: Synthetic oligonucleotide
  Target: APOC3; (+) strand; PAM type: YTN; PAM sequence: CTA
tgaggtgacatccaggcacg

SEQ ID NO: 12522 - DNA, 20 bp, Artificial Sequence
  Description of Artificial Sequence: Synthetic oligonucleotide
  Target: APOC3; (+) strand; PAM type: YTN; PAM sequence: TTG
cactattggctcctgtcggt

SEQ ID NO: 12523 - DNA, 20 bp, Artificial Sequence
  Description of Artificial Sequence: Synthetic oligonucleotide
  Target: APOC3; (+) strand; PAM type: YTN; PAM sequence: CTA
ttggctcctgtcggtgagtg

SEQ ID NO: 12524 - DNA, 20 bp, Artificial Sequence
  Description of Artificial Sequence: Synthetic oligonucleotide
  Target: APOC3; (+) strand; PAM type: YTN; PAM sequence: TTG
gctcctgtcggtgagtgcag

SEQ ID NO: 12525 - DNA, 20 bp, Artificial Sequence
  Description of Artificial Sequence: Synthetic oligonucleotide
  Target: APOC3; (+) strand; PAM type: YTN; PAM sequence: CTC
ctgtcggtgagtgcagtgcc

SEQ ID NO: 12526 - DNA, 20 bp, Artificial Sequence
  Description of Artificial Sequence: Synthetic oligonucleotide
  Target: APOC3; (+) strand; PAM type: YTN; PAM sequence: CTG
tcggtgagtgcagtgcctga

SEQ ID NO: 12527 - DNA, 20 bp, Artificial Sequence
  Description of Artificial Sequence: Synthetic oligonucleotide
  Target: APOC3; (+) strand; PAM type: YTN; PAM sequence: CTG
acaacagtgagctacattta

SEQ ID NO: 12528 - DNA, 20 bp, Artificial Sequence
  Description of Artificial Sequence: Synthetic oligonucleotide
  Target: APOC3; (+) strand; PAM type: YTN; PAM sequence: CTA
catttatttgtaaaaatgaa

SEQ ID NO: 12529 - DNA, 20 bp, Artificial Sequence
  Description of Artificial Sequence: Synthetic oligonucleotide
  Target: APOC3; (+) strand; PAM type: YTN; PAM sequence: TTT
atttgtaaaaatgaacgcca

SEQ ID NO: 12530 - DNA, 20 bp, Artificial Sequence
  Description of Artificial Sequence: Synthetic oligonucleotide
  Target: APOC3; (+) strand; PAM type: YTN; PAM sequence: TTA
tttgtaaaaatgaacgccat

SEQ ID NO: 12531 - DNA, 20 bp, Artificial Sequence
  Description of Artificial Sequence: Synthetic oligonucleotide
  Target: APOC3; (+) strand; PAM type: YTN; PAM sequence: TTT
gtaaaaatgaacgccatcag

SEQ ID NO: 12532 - DNA, 20 bp, Artificial Sequence
  Description of Artificial Sequence: Synthetic oligonucleotide
  Target: APOC3; (+) strand; PAM type: YTN; PAM sequence: TTG
taaaaatgaacgccatcaga

SEQ ID NO: 12533 - DNA, 20 bp, Artificial Sequence
  Description of Artificial Sequence: Synthetic oligonucleotide
  Target: APOC3; (+) strand; PAM type: YTN; PAM sequence: TTG
tactaactctaatttgcttt

SEQ ID NO: 12534 - DNA, 20 bp, Artificial Sequence
  Description of Artificial Sequence: Synthetic oligonucleotide
  Target: APOC3; (+) strand; PAM type: YTN; PAM sequence: CTA
actctaatttgctttgtgtt

SEQ ID NO: 12535 - DNA, 20 bp, Artificial Sequence
  Description of Artificial Sequence: Synthetic oligonucleotide
  Target: APOC3; (+) strand; PAM type: YTN; PAM sequence: CTC
taatttgctttgtgttcatt

SEQ ID NO: 12536 - DNA, 20 bp, Artificial Sequence
  Description of Artificial Sequence: Synthetic oligonucleotide
  Target: APOC3; (+) strand; PAM type: YTN; PAM sequence: CTA
atttgctttgtgttcatttt

SEQ ID NO: 12537 - DNA, 20 bp, Artificial Sequence
  Description of Artificial Sequence: Synthetic oligonucleotide
  Target: APOC3; (+) strand; PAM type: YTN; PAM sequence: TTT
gctttgtgttcattttttca

SEQ ID NO: 12538 - DNA, 20 bp, Artificial Sequence
  Description of Artificial Sequence: Synthetic oligonucleotide
  Target: APOC3; (+) strand; PAM type: YTN; PAM sequence: TTG
ctttgtgttcattttttcag

SEQ ID NO: 12539 - DNA, 20 bp, Artificial Sequence
  Description of Artificial Sequence: Synthetic oligonucleotide
  Target: APOC3; (+) strand; PAM type: YTN; PAM sequence: CTT
tgtgttcattttttcagttt

SEQ ID NO: 12540 - DNA, 20 bp, Artificial Sequence
  Description of Artificial Sequence: Synthetic oligonucleotide
  Target: APOC3; (+) strand; PAM type: YTN; PAM sequence: TTT
gtgttcattttttcagtttc

SEQ ID NO: 12541 - DNA, 20 bp, Artificial Sequence
  Description of Artificial Sequence: Synthetic oligonucleotide
  Target: APOC3; (+) strand; PAM type: YTN; PAM sequence: TTG
tgttcattttttcagtttcc

SEQ ID NO: 12542 - DNA, 20 bp, Artificial Sequence
  Description of Artificial Sequence: Synthetic oligonucleotide
  Target: APOC3; (+) strand; PAM type: YTN; PAM sequence: TTC
attttttcagtttccagaag

SEQ ID NO: 12543 - DNA, 20 bp, Artificial Sequence
  Description of Artificial Sequence: Synthetic oligonucleotide
  Target: APOC3; (+) strand; PAM type: YTN; PAM sequence: TTT
tttcagtttccagaagtggc

SEQ ID NO: 12544 - DNA, 20 bp, Artificial Sequence
  Description of Artificial Sequence: Synthetic oligonucleotide
  Target: APOC3; (+) strand; PAM type: YTN; PAM sequence: TTT
ttcagtttccagaagtggct

SEQ ID NO: 12545 - DNA, 20 bp, Artificial Sequence
  Description of Artificial Sequence: Synthetic oligonucleotide
  Target: APOC3; (+) strand; PAM type: YTN; PAM sequence: TTT
tcagtttccagaagtggctt

SEQ ID NO: 12546 - DNA, 20 bp, Artificial Sequence
  Description of Artificial Sequence: Synthetic oligonucleotide
  Target: APOC3; (+) strand; PAM type: YTN; PAM sequence: TTT
cagtttccagaagtggctta

SEQ ID NO: 12547 - DNA, 20 bp, Artificial Sequence
  Description of Artificial Sequence: Synthetic oligonucleotide
  Target: APOC3; (+) strand; PAM type: YTN; PAM sequence: TTC
agtttccagaagtggcttaa

SEQ ID NO: 12548 - DNA, 20 bp, Artificial Sequence
  Description of Artificial Sequence: Synthetic oligonucleotide
  Target: APOC3; (+) strand; PAM type: YTN; PAM sequence: TTT
ccagaagtggcttaatgttt

SEQ ID NO: 12549 - DNA, 20 bp, Artificial Sequence
  Description of Artificial Sequence: Synthetic oligonucleotide
  Target: APOC3; (+) strand; PAM type: YTN; PAM sequence: TTC
cagaagtggcttaatgtttc

SEQ ID NO: 12550 - DNA, 20 bp, Artificial Sequence
  Description of Artificial Sequence: Synthetic oligonucleotide
  Target: APOC3; (+) strand; PAM type: YTN; PAM sequence: CTT
aatgtttcctagggtcaaag

SEQ ID NO: 12551 - DNA, 20 bp, Artificial Sequence
  Description of Artificial Sequence: Synthetic oligonucleotide
  Target: APOC3; (+) strand; PAM type: YTN; PAM sequence: TTA
atgtttcctagggtcaaagg

SEQ ID NO: 12552 - DNA, 20 bp, Artificial Sequence
  Description of Artificial Sequence: Synthetic oligonucleotide
  Target: APOC3; (+) strand; PAM type: YTN; PAM sequence: TTT
cctagggtcaaaggcagtca

SEQ ID NO: 12553 - DNA, 20 bp, Artificial Sequence
  Description of Artificial Sequence: Synthetic oligonucleotide
  Target: APOC3; (+) strand; PAM type: YTN; PAM sequence: TTC
ctagggtcaaaggcagtcaa

SEQ ID NO: 12554 - DNA, 20 bp, Artificial Sequence
  Description of Artificial Sequence: Synthetic oligonucleotide
  Target: APOC3; (+) strand; PAM type: YTN; PAM sequence: CTA
gggtcaaaggcagtcaaatg

SEQ ID NO: 12555 - DNA, 20 bp, Artificial Sequence
  Description of Artificial Sequence: Synthetic oligonucleotide
  Target: APOC3; (+) strand; PAM type: YTN; PAM sequence: CTC
ctgactctggcaccccttct

SEQ ID NO: 12556 - DNA, 20 bp, Artificial Sequence
  Description of Artificial Sequence: Synthetic oligonucleotide
  Target: APOC3; (+) strand; PAM type: YTN; PAM sequence: CTG
actctggcaccccttctgct

SEQ ID NO: 12557 - DNA, 20 bp, Artificial Sequence
  Description of Artificial Sequence: Synthetic oligonucleotide
  Target: APOC3; (+) strand; PAM type: YTN; PAM sequence: CTC
tggcaccccttctgctgggt

SEQ ID NO: 12558 - DNA, 20 bp, Artificial Sequence
  Description of Artificial Sequence: Synthetic oligonucleotide
  Target: APOC3; (+) strand; PAM type: YTN; PAM sequence: CTG
gcaccccttctgctgggtcc

SEQ ID NO: 12559 - DNA, 20 bp, Artificial Sequence
  Description of Artificial Sequence: Synthetic oligonucleotide
  Target: APOC3; (+) strand; PAM type: YTN; PAM sequence: CTT
ctgctgggtccccactgccc

SEQ ID NO: 12560 - DNA, 20 bp, Artificial Sequence
  Description of Artificial Sequence: Synthetic oligonucleotide
  Target: APOC3; (+) strand; PAM type: YTN; PAM sequence: TTC
tgctgggtccccactgccct

SEQ ID NO: 12561 - DNA, 20 bp, Artificial Sequence
  Description of Artificial Sequence: Synthetic oligonucleotide
  Target: APOC3; (+) strand; PAM type: YTN; PAM sequence: CTG
ctgggtccccactgccctgt

SEQ ID NO: 12562 - DNA, 20 bp, Artificial Sequence
  Description of Artificial Sequence: Synthetic oligonucleotide
  Target: APOC3; (+) strand; PAM type: YTN; PAM sequence: CTG
ggtccccactgccctgtagt

SEQ ID NO: 12563 - DNA, 20 bp, Artificial Sequence
  Description of Artificial Sequence: Synthetic oligonucleotide
  Target: APOC3; (+) strand; PAM type: YTN; PAM sequence: CTG
ccctgtagtggtccccacgc

SEQ ID NO: 12564 - DNA, 20 bp, Artificial Sequence
  Description of Artificial Sequence: Synthetic oligonucleotide
  Target: APOC3; (+) strand; PAM type: YTN; PAM sequence: CTG
tagtggtccccacgctacca

SEQ ID NO: 12565 - DNA, 20 bp, Artificial Sequence
  Description of Artificial Sequence: Synthetic oligonucleotide
  Target: APOC3; (+) strand; PAM type: YTN; PAM sequence: CTA
ccatgctgcctcctttttga

SEQ ID NO: 12566 - DNA, 20 bp, Artificial Sequence
  Description of Artificial Sequence: Synthetic oligonucleotide
  Target: APOC3; (+) strand; PAM type: YTN; PAM sequence: CTG
cctcctttttgatgcagcct

SEQ ID NO: 12567 - DNA, 20 bp, Artificial Sequence
  Description of Artificial Sequence: Synthetic oligonucleotide
  Target: APOC3; (+) strand; PAM type: YTN; PAM sequence: CTC
ctttttgatgcagcctgtgc

SEQ ID NO: 12568 - DNA, 20 bp, Artificial Sequence
  Description of Artificial Sequence: Synthetic oligonucleotide
  Target: APOC3; (+) strand; PAM type: YTN; PAM sequence: CTT
tttgatgcagcctgtgccat

SEQ ID NO: 12569 - DNA, 20 bp, Artificial Sequence
  Description of Artificial Sequence: Synthetic oligonucleotide
  Target: APOC3; (+) strand; PAM type: YTN; PAM sequence: TTT
ttgatgcagcctgtgccatc

SEQ ID NO: 12570 - DNA, 20 bp, Artificial Sequence
  Description of Artificial Sequence: Synthetic oligonucleotide
  Target: APOC3; (+) strand; PAM type: YTN; PAM sequence: TTT
tgatgcagcctgtgccatct

SEQ ID NO: 12571 - DNA, 20 bp, Artificial Sequence
  Description of Artificial Sequence: Synthetic oligonucleotide
  Target: APOC3; (+) strand; PAM type: YTN; PAM sequence: TTT
gatgcagcctgtgccatctc

SEQ ID NO: 12572 - DNA, 20 bp, Artificial Sequence
  Description of Artificial Sequence: Synthetic oligonucleotide
  Target: APOC3; (+) strand; PAM type: YTN; PAM sequence: TTG
atgcagcctgtgccatctct

SEQ ID NO: 12573 - DNA, 20 bp, Artificial Sequence
  Description of Artificial Sequence: Synthetic oligonucleotide
  Target: APOC3; (+) strand; PAM type: YTN; PAM sequence: CTG
tgccatctctccgtgattgt

SEQ ID NO: 12574 - DNA, 20 bp, Artificial Sequence
  Description of Artificial Sequence: Synthetic oligonucleotide
  Target: APOC3; (+) strand; PAM type: YTN; PAM sequence: CTC
tccgtgattgttggggtcag

SEQ ID NO: 12575 - DNA, 20 bp, Artificial Sequence
  Description of Artificial Sequence: Synthetic oligonucleotide
  Target: APOC3; (+) strand; PAM type: YTN; PAM sequence: CTC
cgtgattgttggggtcagat

SEQ ID NO: 12576 - DNA, 20 bp, Artificial Sequence
  Description of Artificial Sequence: Synthetic oligonucleotide
  Target: APOC3; (+) strand; PAM type: YTN; PAM sequence: TTG
ttggggtcagatgctggagt

SEQ ID NO: 12577 - DNA, 20 bp, Artificial Sequence
  Description of Artificial Sequence: Synthetic oligonucleotide
  Target: APOC3; (+) strand; PAM type: YTN; PAM sequence: TTG
gggtcagatgctggagtcca

SEQ ID NO: 12578 - DNA, 20 bp, Artificial Sequence
  Description of Artificial Sequence: Synthetic oligonucleotide
  Target: APOC3; (+) strand; PAM type: YTN; PAM sequence: CTG
gagtccactccctggcttgg

SEQ ID NO: 12579 - DNA, 20 bp, Artificial Sequence
  Description of Artificial Sequence: Synthetic oligonucleotide
  Target: APOC3; (+) strand; PAM type: YTN; PAM sequence: CTC
cctggcttggcatccaggct

SEQ ID NO: 12580 - DNA, 20 bp, Artificial Sequence
  Description of Artificial Sequence: Synthetic oligonucleotide
  Target: APOC3; (+) strand; PAM type: YTN; PAM sequence: CTG
gcttggcatccaggctccaa

SEQ ID NO: 12581 - DNA, 20 bp, Artificial Sequence
  Description of Artificial Sequence: Synthetic oligonucleotide
  Target: APOC3; (+) strand; PAM type: YTN; PAM sequence: CTT
ggcatccaggctccaacacg

SEQ ID NO: 12582 - DNA, 20 bp, Artificial Sequence
  Description of Artificial Sequence: Synthetic oligonucleotide
  Target: APOC3; (+) strand; PAM type: YTN; PAM sequence: TTG
gcatccaggctccaacacgt

SEQ ID NO: 12583 - DNA, 20 bp, Artificial Sequence
  Description of Artificial Sequence: Synthetic oligonucleotide
  Target: APOC3; (+) strand; PAM type: YTN; PAM sequence: CTC
caacacgtactgcctgtgtg

SEQ ID NO: 12584 - DNA, 20 bp, Artificial Sequence
  Description of Artificial Sequence: Synthetic oligonucleotide
  Target: APOC3; (+) strand; PAM type: YTN; PAM sequence: CTG
cctgtgtgtccttgggcaag

SEQ ID NO: 12585 - DNA, 20 bp, Artificial Sequence
  Description of Artificial Sequence: Synthetic oligonucleotide
  Target: APOC3; (+) strand; PAM type: YTN; PAM sequence: CTG
tgtgtccttgggcaagtctc

SEQ ID NO: 12586 - DNA, 20 bp, Artificial Sequence
  Description of Artificial Sequence: Synthetic oligonucleotide
  Target: APOC3; (+) strand; PAM type: YTN; PAM sequence: CTT
gggcaagtctcataacctct

SEQ ID NO: 12587 - DNA, 20 bp, Artificial Sequence
  Description of Artificial Sequence: Synthetic oligonucleotide
  Target: APOC3; (+) strand; PAM type: YTN; PAM sequence: TTG
ggcaagtctcataacctctc

SEQ ID NO: 12588 - DNA, 20 bp, Artificial Sequence
  Description of Artificial Sequence: Synthetic oligonucleotide
  Target: APOC3; (+) strand; PAM type: YTN; PAM sequence: CTC
ataacctctctgagcctcag

SEQ ID NO: 12589 - DNA, 20 bp, Artificial Sequence
  Description of Artificial Sequence: Synthetic oligonucleotide
  Target: APOC3; (+) strand; PAM type: YTN; PAM sequence: CTC
tctgagcctcagttaccttg

SEQ ID NO: 12590 - DNA, 20 bp, Artificial Sequence
  Description of Artificial Sequence: Synthetic oligonucleotide
  Target: APOC3; (+) strand; PAM type: YTN; PAM sequence: CTC
tgagcctcagttaccttggt

SEQ ID NO: 12591 - DNA, 20 bp, Artificial Sequence
  Description of Artificial Sequence: Synthetic oligonucleotide
  Target: APOC3; (+) strand; PAM type: YTN; PAM sequence: CTG
agcctcagttaccttggtga

SEQ ID NO: 12592 - DNA, 20 bp, Artificial Sequence
  Description of Artificial Sequence: Synthetic oligonucleotide
  Target: APOC3; (+) strand; PAM type: YTN; PAM sequence: CTC
agttaccttggtgagacata

SEQ ID NO: 12593 - DNA, 20 bp, Artificial Sequence
  Description of Artificial Sequence: Synthetic oligonucleotide
  Target: APOC3; (+) strand; PAM type: YTN; PAM sequence: TTA
ccttggtgagacataaccat

SEQ ID NO: 12594 - DNA, 20 bp, Artificial Sequence
  Description of Artificial Sequence: Synthetic oligonucleotide
  Target: APOC3; (+) strand; PAM type: YTN; PAM sequence: CTT
ggtgagacataaccattgta

SEQ ID NO: 12595 - DNA, 20 bp, Artificial Sequence
  Description of Artificial Sequence: Synthetic oligonucleotide
  Target: APOC3; (+) strand; PAM type: YTN; PAM sequence: TTG
gtgagacataaccattgtac

SEQ ID NO: 12596 - DNA, 20 bp, Artificial Sequence
  Description of Artificial Sequence: Synthetic oligonucleotide
  Target: APOC3; (+) strand; PAM type: YTN; PAM sequence: TTG
tacctgcctcctaggctgtg

SEQ ID NO: 12597 - DNA, 20 bp, Artificial Sequence
  Description of Artificial Sequence: Synthetic oligonucleotide
  Target: APOC3; (+) strand; PAM type: YTN; PAM sequence: CTG
cctcctaggctgtgaggatt

SEQ ID NO: 12598 - DNA, 20 bp, Artificial Sequence
  Description of Artificial Sequence: Synthetic oligonucleotide
  Target: APOC3; (+) strand; PAM type: YTN; PAM sequence: CTC
ctaggctgtgaggattcact

SEQ ID NO: 12599 - DNA, 20 bp, Artificial Sequence
  Description of Artificial Sequence: Synthetic oligonucleotide
  Target: APOC3; (+) strand; PAM type: YTN; PAM sequence: CTA
ggctgtgaggattcactgag

SEQ ID NO: 12600 - DNA, 20 bp, Artificial Sequence
  Description of Artificial Sequence: Synthetic oligonucleotide
  Target: APOC3; (+) strand; PAM type: YTN; PAM sequence: CTG
tgaggattcactgagatgat

SEQ ID NO: 12601 - DNA, 20 bp, Artificial Sequence
  Description of Artificial Sequence: Synthetic oligonucleotide
  Target: APOC3; (+) strand; PAM type: YTN; PAM sequence: TTC
actgagatgatcttatagtg

SEQ ID NO: 12602 - DNA, 20 bp, Artificial Sequence
  Description of Artificial Sequence: Synthetic oligonucleotide
  Target: APOC3; (+) strand; PAM type: YTN; PAM sequence: CTG
agatgatcttatagtgcttg

SEQ ID NO: 12603 - DNA, 20 bp, Artificial Sequence
  Description of Artificial Sequence: Synthetic oligonucleotide
  Target: APOC3; (+) strand; PAM type: YTN; PAM sequence: CTT
atagtgcttgcaacaatgtc

SEQ ID NO: 12604 - DNA, 20 bp, Artificial Sequence
  Description of Artificial Sequence: Synthetic oligonucleotide
  Target: APOC3; (+) strand; PAM type: YTN; PAM sequence: TTA
tagtgcttgcaacaatgtct

SEQ ID NO: 12605 - DNA, 20 bp, Artificial Sequence
  Description of Artificial Sequence: Synthetic oligonucleotide
  Target: APOC3; (+) strand; PAM type: YTN; PAM sequence: CTT
gcaacaatgtctggcacata

SEQ ID NO: 12606 - DNA, 20 bp, Artificial Sequence
  Description of Artificial Sequence: Synthetic oligonucleotide
  Target: APOC3; (+) strand; PAM type: YTN; PAM sequence: TTG
caacaatgtctggcacatag

SEQ ID NO: 12607 - DNA, 20 bp, Artificial Sequence
  Description of Artificial Sequence: Synthetic oligonucleotide
  Target: APOC3; (+) strand; PAM type: YTN; PAM sequence: CTG
gcacataggaaaagtgatca

SEQ ID NO: 12608 - DNA, 20 bp, Artificial Sequence
  Description of Artificial Sequence: Synthetic oligonucleotide
  Target: APOC3; (+) strand; PAM type: YTN; PAM sequence: CTA
aatgttagccacgtcttact

SEQ ID NO: 12609 - DNA, 20 bp, Artificial Sequence
  Description of Artificial Sequence: Synthetic oligonucleotide
  Target: APOC3; (+) strand; PAM type: YTN; PAM sequence: TTA
gccacgtcttactcctgcaa

SEQ ID NO: 12610 - DNA, 20 bp, Artificial Sequence
  Description of Artificial Sequence: Synthetic oligonucleotide
  Target: APOC3; (+) strand; PAM type: YTN; PAM sequence: CTT
actcctgcaaggctcacctc

SEQ ID NO: 12611 - DNA, 20 bp, Artificial Sequence
  Description of Artificial Sequence: Synthetic oligonucleotide
  Target: APOC3; (+) strand; PAM type: YTN; PAM sequence: TTA
ctcctgcaaggctcacctcc

SEQ ID NO: 12612 - DNA, 20 bp, Artificial Sequence
  Description of Artificial Sequence: Synthetic oligonucleotide
  Target: APOC3; (+) strand; PAM type: YTN; PAM sequence: CTC
ctgcaaggctcacctccctg

SEQ ID NO: 12613 - DNA, 20 bp, Artificial Sequence
  Description of Artificial Sequence: Synthetic oligonucleotide
  Target: APOC3; (+) strand; PAM type: YTN; PAM sequence: CTG
caaggctcacctccctggaa

SEQ ID NO: 12614 - DNA, 20 bp, Artificial Sequence
  Description of Artificial Sequence: Synthetic oligonucleotide
  Target: APOC3; (+) strand; PAM type: YTN; PAM sequence: CTC
acctccctggaacccatcgg

SEQ ID NO: 12615 - DNA, 20 bp, Artificial Sequence
  Description of Artificial Sequence: Synthetic oligonucleotide
  Target: APOC3; (+) strand; PAM type: YTN; PAM sequence: CTC
cctggaacccatcggtccca

SEQ ID NO: 12616 - DNA, 20 bp, Artificial Sequence
  Description of Artificial Sequence: Synthetic oligonucleotide
  Target: APOC3; (+) strand; PAM type: YTN; PAM sequence: CTG
gaacccatcggtcccaaccc

SEQ ID NO: 12617 - DNA, 20 bp, Artificial Sequence
  Description of Artificial Sequence: Synthetic oligonucleotide
  Target: APOC3; (+) strand; PAM type: YTN; PAM sequence: CTG
ctcctgaatcaggcacagtc

SEQ ID NO: 12618 - DNA, 20 bp, Artificial Sequence
  Description of Artificial Sequence: Synthetic oligonucleotide
  Target: APOC3; (+) strand; PAM type: YTN; PAM sequence: CTC
ctgaatcaggcacagtccag

SEQ ID NO: 12619 - DNA, 20 bp, Artificial Sequence
  Description of Artificial Sequence: Synthetic oligonucleotide
  Target: APOC3; (+) strand; PAM type: YTN; PAM sequence: CTG
aatcaggcacagtccagctt

SEQ ID NO: 12620 - DNA, 20 bp, Artificial Sequence
  Description of Artificial Sequence: Synthetic oligonucleotide
  Target: APOC3; (+) strand; PAM type: YTN; PAM sequence: CTT
gcagcgggagcaaaggtcag

SEQ ID NO: 12621 - DNA, 20 bp, Artificial Sequence
  Description of Artificial Sequence: Synthetic oligonucleotide
  Target: APOC3; (+) strand; PAM type: YTN; PAM sequence: TTG
cagcgggagcaaaggtcagt

SEQ ID NO: 12622 - DNA, 20 bp, Artificial Sequence
  Description of Artificial Sequence: Synthetic oligonucleotide
  Target: APOC3; (+) strand; PAM type: YTN; PAM sequence: CTC
agtgcccctgtcccttcccc

SEQ ID NO: 12623 - DNA, 20 bp, Artificial Sequence
  Description of Artificial Sequence: Synthetic oligonucleotide
  Target: APOC3; (+) strand; PAM type: YTN; PAM sequence: CTG
tcccttccccaggccagagg

SEQ ID NO: 12624 - DNA, 20 bp, Artificial Sequence
  Description of Artificial Sequence: Synthetic oligonucleotide
  Target: APOC3; (+) strand; PAM type: YTN; PAM sequence: CTT
ccccaggccagaggggagga

SEQ ID NO: 12625 - DNA, 20 bp, Artificial Sequence
  Description of Artificial Sequence: Synthetic oligonucleotide
  Target: APOC3; (+) strand; PAM type: YTN; PAM sequence: TTC
cccaggccagaggggaggag

SEQ ID NO: 12626 - DNA, 20 bp, Artificial Sequence
  Description of Artificial Sequence: Synthetic oligonucleotide
  Target: APOC3; (+) strand; PAM type: YTN; PAM sequence: CTG
agtcacgaatgacacctcag

SEQ ID NO: 12627 - DNA, 20 bp, Artificial Sequence
  Description of Artificial Sequence: Synthetic oligonucleotide
  Target: APOC3; (+) strand; PAM type: YTN; PAM sequence: CTC
agccgcagtttgacctccag

SEQ ID NO: 12628 - DNA, 20 bp, Artificial Sequence
  Description of Artificial Sequence: Synthetic oligonucleotide
  Target: APOC3; (+) strand; PAM type: YTN; PAM sequence: TTT
gacctccaggacttacagtc

SEQ ID NO: 12629 - DNA, 20 bp, Artificial Sequence
  Description of Artificial Sequence: Synthetic oligonucleotide
  Target: APOC3; (+) strand; PAM type: YTN; PAM sequence: TTG
acctccaggacttacagtcc

SEQ ID NO: 12630 - DNA, 20 bp, Artificial Sequence
  Description of Artificial Sequence: Synthetic oligonucleotide
  Target: APOC3; (+) strand; PAM type: YTN; PAM sequence: CTC
caggacttacagtcctagca

SEQ ID NO: 12631 - DNA, 20 bp, Artificial Sequence
  Description of Artificial Sequence: Synthetic oligonucleotide
  Target: APOC3; (+) strand; PAM type: YTN; PAM sequence: CTT
acagtcctagcagccggtgc

SEQ ID NO: 12632 - DNA, 20 bp, Artificial Sequence
  Description of Artificial Sequence: Synthetic oligonucleotide
  Target: APOC3; (+) strand; PAM type: YTN; PAM sequence: TTA
cagtcctagcagccggtgcc

SEQ ID NO: 12633 - DNA, 20 bp, Artificial Sequence
  Description of Artificial Sequence: Synthetic oligonucleotide
  Target: APOC3; (+) strand; PAM type: YTN; PAM sequence: CTA
gcagccggtgccactagcat

SEQ ID NO: 12634 - DNA, 20 bp, Artificial Sequence
  Description of Artificial Sequence: Synthetic oligonucleotide
  Target: APOC3; (+) strand; PAM type: YTN; PAM sequence: CTA
gcatgtgagaggtccagagg

SEQ ID NO: 12635 - DNA, 20 bp, Artificial Sequence
  Description of Artificial Sequence: Synthetic oligonucleotide
  Target: APOC3; (+) strand; PAM type: YTN; PAM sequence: CTT
ctgtctcacccgcccgcctg

SEQ ID NO: 12636 - DNA, 20 bp, Artificial Sequence
  Description of Artificial Sequence: Synthetic oligonucleotide
  Target: APOC3; (+) strand; PAM type: YTN; PAM sequence: TTC
tgtctcacccgcccgcctgg

SEQ ID NO: 12637 - DNA, 20 bp, Artificial Sequence
  Description of Artificial Sequence: Synthetic oligonucleotide
  Target: APOC3; (+) strand; PAM type: YTN; PAM sequence: CTG
tctcacccgcccgcctgggt

SEQ ID NO: 12638 - DNA, 20 bp, Artificial Sequence
  Description of Artificial Sequence: Synthetic oligonucleotide
  Target: APOC3; (+) strand; PAM type: YTN; PAM sequence: CTC
acccgcccgcctgggtgcac

SEQ ID NO: 12639 - DNA, 20 bp, Artificial Sequence
  Description of Artificial Sequence: Synthetic oligonucleotide
  Target: APOC3; (+) strand; PAM type: YTN; PAM sequence: CTG
ggtgcacccatgctgggagc

SEQ ID NO: 12640 - DNA, 20 bp, Artificial Sequence
  Description of Artificial Sequence: Synthetic oligonucleotide
  Target: APOC3; (+) strand; PAM type: YTN; PAM sequence: CTG
ggagcgcctgcaccatttga

SEQ ID NO: 12641 - DNA, 20 bp, Artificial Sequence
  Description of Artificial Sequence: Synthetic oligonucleotide
  Target: APOC3; (+) strand; PAM type: YTN; PAM sequence: CTG
caccatttgagcatgtccga

SEQ ID NO: 12642 - DNA, 20 bp, Artificial Sequence
  Description of Artificial Sequence: Synthetic oligonucleotide
  Target: APOC3; (+) strand; PAM type: YTN; PAM sequence: TTT
gagcatgtccgagagcatcc

SEQ ID NO: 12643 - DNA, 20 bp, Artificial Sequence
  Description of Artificial Sequence: Synthetic oligonucleotide
  Target: APOC3; (+) strand; PAM type: YTN; PAM sequence: TTG
agcatgtccgagagcatcca

SEQ ID NO: 12644 - DNA, 20 bp, Artificial Sequence
  Description of Artificial Sequence: Synthetic oligonucleotide
  Target: APOC3; (+) strand; PAM type: YTN; PAM sequence: TTC
acagaagtgtgcaaatcact

SEQ ID NO: 12645 - DNA, 20 bp, Artificial Sequence
  Description of Artificial Sequence: Synthetic oligonucleotide
  Target: APOC3; (+) strand; PAM type: YTN; PAM sequence: CTA
agaaccaagggactggcaca

SEQ ID NO: 12646 - DNA, 20 bp, Artificial Sequence
  Description of Artificial Sequence: Synthetic oligonucleotide
  Target: APOC3; (+) strand; PAM type: YTN; PAM sequence: CTG
gcacagcccatgcgtgcacc

SEQ ID NO: 12647 - DNA, 20 bp, Artificial Sequence
  Description of Artificial Sequence: Synthetic oligonucleotide
  Target: APOC3; (+) strand; PAM type: YTN; PAM sequence: CTC
gcgaggggacctgctgcctt

SEQ ID NO: 12648 - DNA, 20 bp, Artificial Sequence
  Description of Artificial Sequence: Synthetic oligonucleotide
  Target: APOC3; (+) strand; PAM type: YTN; PAM sequence: CTG
ctgcctttcaacgtggcggg

SEQ ID NO: 12649 - DNA, 20 bp, Artificial Sequence
  Description of Artificial Sequence: Synthetic oligonucleotide
  Target: APOC3; (+) strand; PAM type: YTN; PAM sequence: CTG
cctttcaacgtggcggggac

SEQ ID NO: 12650 - DNA, 20 bp, Artificial Sequence
  Description of Artificial Sequence: Synthetic oligonucleotide
  Target: APOC3; (+) strand; PAM type: YTN; PAM sequence: CTT
tcaacgtggcggggacgtga

SEQ ID NO: 12651 - DNA, 20 bp, Artificial Sequence
  Description of Artificial Sequence: Synthetic oligonucleotide
  Target: APOC3; (+) strand; PAM type: YTN; PAM sequence: TTT
caacgtggcggggacgtgac

SEQ ID NO: 12652 - DNA, 20 bp, Artificial Sequence
  Description of Artificial Sequence: Synthetic oligonucleotide
  Target: APOC3; (+) strand; PAM type: YTN; PAM sequence: TTC
aacgtggcggggacgtgacc

SEQ ID NO: 12653 - DNA, 20 bp, Artificial Sequence
  Description of Artificial Sequence: Synthetic oligonucleotide
  Target: APOC3; (+) strand; PAM type: YTN; PAM sequence: CTG
ttaatgaatgtatttacttc

SEQ ID NO: 12654 - DNA, 20 bp, Artificial Sequence
  Description of Artificial Sequence: Synthetic oligonucleotide
  Target: APOC3; (+) strand; PAM type: YTN; PAM sequence: TTA
atgaatgtatttacttccca

SEQ ID NO: 12655 - DNA, 20 bp, Artificial Sequence
  Description of Artificial Sequence: Synthetic oligonucleotide
  Target: APOC3; (+) strand; PAM type: YTN; PAM sequence: TTT
acttcccaaagtctgagggt

SEQ ID NO: 12656 - DNA, 20 bp, Artificial Sequence
  Description of Artificial Sequence: Synthetic oligonucleotide
  Target: APOC3; (+) strand; PAM type: YTN; PAM sequence: TTA
cttcccaaagtctgagggta

SEQ ID NO: 12657 - DNA, 20 bp, Artificial Sequence
  Description of Artificial Sequence: Synthetic oligonucleotide
  Target: APOC3; (+) strand; PAM type: YTN; PAM sequence: CTT
cccaaagtctgagggtacgt

SEQ ID NO: 12658 - DNA, 20 bp, Artificial Sequence
  Description of Artificial Sequence: Synthetic oligonucleotide
  Target: APOC3; (+) strand; PAM type: YTN; PAM sequence: TTC
ccaaagtctgagggtacgtt

SEQ ID NO: 12659 - DNA, 20 bp, Artificial Sequence
  Description of Artificial Sequence: Synthetic oligonucleotide
  Target: APOC3; (+) strand; PAM type: YTN; PAM sequence: CTG
agggtacgttttgcatcaat

SEQ ID NO: 12660 - DNA, 20 bp, Artificial Sequence
  Description of Artificial Sequence: Synthetic oligonucleotide
  Target: APOC3; (+) strand; PAM type: YTN; PAM sequence: TTT
tgcatcaatctgtagatgga

SEQ ID NO: 12661 - DNA, 20 bp, Artificial Sequence
  Description of Artificial Sequence: Synthetic oligonucleotide
  Target: APOC3; (+) strand; PAM type: YTN; PAM sequence: TTT
gcatcaatctgtagatggat

SEQ ID NO: 12662 - DNA, 20 bp, Artificial Sequence
  Description of Artificial Sequence: Synthetic oligonucleotide
  Target: APOC3; (+) strand; PAM type: YTN; PAM sequence: TTG
catcaatctgtagatggatt

SEQ ID NO: 12663 - DNA, 20 bp, Artificial Sequence
  Description of Artificial Sequence: Synthetic oligonucleotide
  Target: APOC3; (+) strand; PAM type: YTN; PAM sequence: CTG
tagatggatttgttttgggg

SEQ ID NO: 12664 - DNA, 20 bp, Artificial Sequence
  Description of Artificial Sequence: Synthetic oligonucleotide
  Target: APOC3; (+) strand; PAM type: YTN; PAM sequence: TTT
gttttggggagcagggagag

SEQ ID NO: 12665 - DNA, 20 bp, Artificial Sequence
  Description of Artificial Sequence: Synthetic oligonucleotide
  Target: APOC3; (+) strand; PAM type: YTN; PAM sequence: TTG
ttttggggagcagggagaga

SEQ ID NO: 12666 - DNA, 20 bp, Artificial Sequence
  Description of Artificial Sequence: Synthetic oligonucleotide
  Target: APOC3; (+) strand; PAM type: YTN; PAM sequence: TTT
tggggagcagggagagaatg

SEQ ID NO: 12667 - DNA, 20 bp, Artificial Sequence
  Description of Artificial Sequence: Synthetic oligonucleotide
  Target: APOC3; (+) strand; PAM type: YTN; PAM sequence: TTT
ggggagcagggagagaatga

SEQ ID NO: 12668 - DNA, 20 bp, Artificial Sequence
  Description of Artificial Sequence: Synthetic oligonucleotide
  Target: APOC3; (+) strand; PAM type: YTN; PAM sequence: TTG
gggagcagggagagaatgag

SEQ ID NO: 12669 - DNA, 20 bp, Artificial Sequence
  Description of Artificial Sequence: Synthetic oligonucleotide
  Target: APOC3; (+) strand; PAM type: YTN; PAM sequence: CTG
tgctcagtcttagagggtgc

SEQ ID NO: 12670 - DNA, 20 bp, Artificial Sequence
  Description of Artificial Sequence: Synthetic oligonucleotide
  Target: APOC3; (+) strand; PAM type: YTN; PAM sequence: CTC
agtcttagagggtgcaagta

SEQ ID NO: 12671 - DNA, 20 bp, Artificial Sequence
  Description of Artificial Sequence: Synthetic oligonucleotide
  Target: APOC3; (+) strand; PAM type: YTN; PAM sequence: CTT
agagggtgcaagtagctgat

SEQ ID NO: 12672 - DNA, 20 bp, Artificial Sequence
  Description of Artificial Sequence: Synthetic oligonucleotide
  Target: APOC3; (+) strand; PAM type: YTN; PAM sequence: TTA
gagggtgcaagtagctgatg

SEQ ID NO: 12673 - DNA, 20 bp, Artificial Sequence
  Description of Artificial Sequence: Synthetic oligonucleotide
  Target: APOC3; (+) strand; PAM type: YTN; PAM sequence: CTG
atgggaagagcagactgcct

SEQ ID NO: 12674 - DNA, 20 bp, Artificial Sequence
  Description of Artificial Sequence: Synthetic oligonucleotide
  Target: APOC3; (+) strand; PAM type: YTN; PAM sequence: CTG
ccttccagccaggcctggtc

SEQ ID NO: 12675 - DNA, 20 bp, Artificial Sequence
  Description of Artificial Sequence: Synthetic oligonucleotide
  Target: APOC3; (+) strand; PAM type: YTN; PAM sequence: CTT
ccagccaggcctggtcctgt

SEQ ID NO: 12676 - DNA, 20 bp, Artificial Sequence
  Description of Artificial Sequence: Synthetic oligonucleotide
  Target: APOC3; (+) strand; PAM type: YTN; PAM sequence: TTC
cagccaggcctggtcctgtg

SEQ ID NO: 12677 - DNA, 20 bp, Artificial Sequence
  Description of Artificial Sequence: Synthetic oligonucleotide
  Target: APOC3; (+) strand; PAM type: YTN; PAM sequence: CTG
gtcctgtgagtcagggacgt

SEQ ID NO: 12678 - DNA, 20 bp, Artificial Sequence
  Description of Artificial Sequence: Synthetic oligonucleotide
  Target: APOC3; (+) strand; PAM type: YTN; PAM sequence: CTG
tgagtcagggacgtccatct

SEQ ID NO: 12679 - DNA, 20 bp, Artificial Sequence
  Description of Artificial Sequence: Synthetic oligonucleotide
  Target: APOC3; (+) strand; PAM type: YTN; PAM sequence: CTT
agtgggcatgaaaggcctgt

SEQ ID NO: 12680 - DNA, 20 bp, Artificial Sequence
  Description of Artificial Sequence: Synthetic oligonucleotide
  Target: APOC3; (+) strand; PAM type: YTN; PAM sequence: TTA
gtgggcatgaaaggcctgtg

SEQ ID NO: 12681 - DNA, 20 bp, Artificial Sequence
  Description of Artificial Sequence: Synthetic oligonucleotide
  Target: APOC3; (+) strand; PAM type: YTN; PAM sequence: CTG
tgtgatctcgagggagacat

SEQ ID NO: 12682 - DNA, 20 bp, Artificial Sequence
  Description of Artificial Sequence: Synthetic oligonucleotide
  Target: APOC3; (+) strand; PAM type: YTN; PAM sequence: CTC
gagggagacatcgcctctcc

SEQ ID NO: 12683 - DNA, 20 bp, Artificial Sequence
  Description of Artificial Sequence: Synthetic oligonucleotide
  Target: APOC3; (+) strand; PAM type: YTN; PAM sequence: CTC
tccaagcctctccttatctg

SEQ ID NO: 12684 - DNA, 20 bp, Artificial Sequence
  Description of Artificial Sequence: Synthetic oligonucleotide
  Target: APOC3; (+) strand; PAM type: YTN; PAM sequence: CTC
caagcctctccttatctgtg

SEQ ID NO: 12685 - DNA, 20 bp, Artificial Sequence
  Description of Artificial Sequence: Synthetic oligonucleotide
  Target: APOC3; (+) strand; PAM type: YTN; PAM sequence: CTC
tccttatctgtgcaacaggc

SEQ ID NO: 12686 - DNA, 20 bp, Artificial Sequence
  Description of Artificial Sequence: Synthetic oligonucleotide
  Target: APOC3; (+) strand; PAM type: YTN; PAM sequence: CTC
cttatctgtgcaacaggcag

SEQ ID NO: 12687 - DNA, 20 bp, Artificial Sequence
  Description of Artificial Sequence: Synthetic oligonucleotide
  Target: APOC3; (+) strand; PAM type: YTN; PAM sequence: CTT
atctgtgcaacaggcagact

SEQ ID NO: 12688 - DNA, 20 bp, Artificial Sequence
  Description of Artificial Sequence: Synthetic oligonucleotide
  Target: APOC3; (+) strand; PAM type: YTN; PAM sequence: TTA
tctgtgcaacaggcagactt

SEQ ID NO: 12689 - DNA, 20 bp, Artificial Sequence
  Description of Artificial Sequence: Synthetic oligonucleotide
  Target: APOC3; (+) strand; PAM type: YTN; PAM sequence: CTG
tgcaacaggcagacttaatg

SEQ ID NO: 12690 - DNA, 20 bp, Artificial Sequence
  Description of Artificial Sequence: Synthetic oligonucleotide
  Target: APOC3; (+) strand; PAM type: YTN; PAM sequence: CTT
aatgattggtgaggcaatga

SEQ ID NO: 12691 - DNA, 20 bp, Artificial Sequence
  Description of Artificial Sequence: Synthetic oligonucleotide
  Target: APOC3; (+) strand; PAM type: YTN; PAM sequence: TTA
atgattggtgaggcaatgag

SEQ ID NO: 12692 - DNA, 20 bp, Artificial Sequence
  Description of Artificial Sequence: Synthetic oligonucleotide
  Target: APOC3; (+) strand; PAM type: YTN; PAM sequence: TTG
gtgaggcaatgaggctgata

SEQ ID NO: 12693 - DNA, 20 bp, Artificial Sequence
  Description of Artificial Sequence: Synthetic oligonucleotide
  Target: APOC3; (+) strand; PAM type: YTN; PAM sequence: CTG
atagctcagcattagctaca

SEQ ID NO: 12694 - DNA, 20 bp, Artificial Sequence
  Description of Artificial Sequence: Synthetic oligonucleotide
  Target: APOC3; (+) strand; PAM type: YTN; PAM sequence: CTC
agcattagctacagccaccc

SEQ ID NO: 12695 - DNA, 20 bp, Artificial Sequence
  Description of Artificial Sequence: Synthetic oligonucleotide
  Target: APOC3; (+) strand; PAM type: YTN; PAM sequence: TTA
gctacagccacccctcctgg

SEQ ID NO: 12696 - DNA, 20 bp, Artificial Sequence
  Description of Artificial Sequence: Synthetic oligonucleotide
  Target: APOC3; (+) strand; PAM type: YTN; PAM sequence: CTA
cagccacccctcctggccaa

SEQ ID NO: 12697 - DNA, 20 bp, Artificial Sequence
  Description of Artificial Sequence: Synthetic oligonucleotide
  Target: APOC3; (+) strand; PAM type: YTN; PAM sequence: CTC
ctggccaaccacacagggat

SEQ ID NO: 12698 - DNA, 20 bp, Artificial Sequence
  Description of Artificial Sequence: Synthetic oligonucleotide
  Target: APOC3; (+) strand; PAM type: YTN; PAM sequence: CTG
gccaaccacacagggatcaa

SEQ ID NO: 12699 - DNA, 20 bp, Artificial Sequence
  Description of Artificial Sequence: Synthetic oligonucleotide
  Target: APOC3; (+) strand; PAM type: YTN; PAM sequence: CTC
agatccagccagggacaggc

SEQ ID NO: 12700 - DNA, 20 bp, Artificial Sequence
  Description of Artificial Sequence: Synthetic oligonucleotide
  Target: APOC3; (+) strand; PAM type: YTN; PAM sequence: CTC
acgtatgcttcaaggggccc

SEQ ID NO: 12701 - DNA, 20 bp, Artificial Sequence
  Description of Artificial Sequence: Synthetic oligonucleotide
  Target: APOC3; (+) strand; PAM type: YTN; PAM sequence: CTT
caaggggccctcccccgggc

SEQ ID NO: 12702 - DNA, 20 bp, Artificial Sequence
  Description of Artificial Sequence: Synthetic oligonucleotide
  Target: APOC3; (+) strand; PAM type: YTN; PAM sequence: TTC
aaggggccctcccccgggca

SEQ ID NO: 12703 - DNA, 20 bp, Artificial Sequence
  Description of Artificial Sequence: Synthetic oligonucleotide
  Target: APOC3; (+) strand; PAM type: YTN; PAM sequence: CTC
ccccgggcagaactgaagga

SEQ ID NO: 12704 - DNA, 20 bp, Artificial Sequence
  Description of Artificial Sequence: Synthetic oligonucleotide
  Target: APOC3; (+) strand; PAM type: YTN; PAM sequence: CTG
aaggacagctcctgttgcca

SEQ ID NO: 12705 - DNA, 20 bp, Artificial Sequence
  Description of Artificial Sequence: Synthetic oligonucleotide
  Target: APOC3; (+) strand; PAM type: YTN; PAM sequence: CTC
ctgttgccataggagggagc

SEQ ID NO: 12706 - DNA, 20 bp, Artificial Sequence
  Description of Artificial Sequence: Synthetic oligonucleotide
  Target: APOC3; (+) strand; PAM type: YTN; PAM sequence: CTG
ttgccataggagggagctgg

SEQ ID NO: 12707 - DNA, 20 bp, Artificial Sequence
  Description of Artificial Sequence: Synthetic oligonucleotide
  Target: APOC3; (+) strand; PAM type: YTN; PAM sequence: TTG
ccataggagggagctgggtg

SEQ ID NO: 12708 - DNA, 20 bp, Artificial Sequence
  Description of Artificial Sequence: Synthetic oligonucleotide
  Target: APOC3; (+) strand; PAM type: YTN; PAM sequence: CTG
ggtgagatactaggaggaac

SEQ ID NO: 12709 - DNA, 20 bp, Artificial Sequence
  Description of Artificial Sequence: Synthetic oligonucleotide
  Target: APOC3; (+) strand; PAM type: YTN; PAM sequence: CTA
ggaggaacttccggcatgat

SEQ ID NO: 12710 - DNA, 20 bp, Artificial Sequence
  Description of Artificial Sequence: Synthetic oligonucleotide
  Target: APOC3; (+) strand; PAM type: YTN; PAM sequence: CTT
ccggcatgatgatgtgtgat

SEQ ID NO: 12711 - DNA, 20 bp, Artificial Sequence
  Description of Artificial Sequence: Synthetic oligonucleotide
  Target: APOC3; (+) strand; PAM type: YTN; PAM sequence: TTC
cggcatgatgatgtgtgatg

SEQ ID NO: 12712 - DNA, 20 bp, Artificial Sequence
  Description of Artificial Sequence: Synthetic oligonucleotide
  Target: APOC3; (+) strand; PAM type: YTN; PAM sequence: CTC
tggccaacaggtctgaatca

SEQ ID NO: 12713 - DNA, 20 bp, Artificial Sequence
  Description of Artificial Sequence: Synthetic oligonucleotide
  Target: APOC3; (+) strand; PAM type: YTN; PAM sequence: CTG
gccaacaggtctgaatcagg

SEQ ID NO: 12714 - DNA, 20 bp, Artificial Sequence
  Description of Artificial Sequence: Synthetic oligonucleotide
  Target: APOC3; (+) strand; PAM type: YTN; PAM sequence: CTG
aatcagggctgcccagccca

SEQ ID NO: 12715 - DNA, 20 bp, Artificial Sequence
  Description of Artificial Sequence: Synthetic oligonucleotide
  Target: APOC3; (+) strand; PAM type: YTN; PAM sequence: CTG
cccagcccagcctggtggga

SEQ ID NO: 12716 - DNA, 20 bp, Artificial Sequence
  Description of Artificial Sequence: Synthetic oligonucleotide
  Target: APOC3; (+) strand; PAM type: YTN; PAM sequence: CTG
gtgggaagggcatggagcat

SEQ ID NO: 12717 - DNA, 20 bp, Artificial Sequence
  Description of Artificial Sequence: Synthetic oligonucleotide
  Target: APOC3; (+) strand; PAM type: YTN; PAM sequence: CTC
atgtactaaacctcacctgg

SEQ ID NO: 12718 - DNA, 20 bp, Artificial Sequence
  Description of Artificial Sequence: Synthetic oligonucleotide
  Target: APOC3; (+) strand; PAM type: YTN; PAM sequence: CTA
aacctcacctggacacaagg

SEQ ID NO: 12719 - DNA, 20 bp, Artificial Sequence
  Description of Artificial Sequence: Synthetic oligonucleotide
  Target: APOC3; (+) strand; PAM type: YTN; PAM sequence: CTC
acctggacacaaggtgaaac

SEQ ID NO: 12720 - DNA, 20 bp, Artificial Sequence
  Description of Artificial Sequence: Synthetic oligonucleotide
  Target: APOC3; (+) strand; PAM type: YTN; PAM sequence: CTG
gacacaaggtgaaacagccc

SEQ ID NO: 12721 - DNA, 20 bp, Artificial Sequence
  Description of Artificial Sequence: Synthetic oligonucleotide
  Target: APOC3; (+) strand; PAM type: YTN; PAM sequence: TTT
ttggccccggatggtcaaat

SEQ ID NO: 12722 - DNA, 20 bp, Artificial Sequence
  Description of Artificial Sequence: Synthetic oligonucleotide
  Target: APOC3; (+) strand; PAM type: YTN; PAM sequence: TTT
tggccccggatggtcaaatc

SEQ ID NO: 12723 - DNA, 20 bp, Artificial Sequence
  Description of Artificial Sequence: Synthetic oligonucleotide
  Target: APOC3; (+) strand; PAM type: YTN; PAM sequence: TTT
ggccccggatggtcaaatcc

SEQ ID NO: 12724 - DNA, 20 bp, Artificial Sequence
  Description of Artificial Sequence: Synthetic oligonucleotide
  Target: APOC3; (+) strand; PAM type: YTN; PAM sequence: TTG
gccccggatggtcaaatccc

SEQ ID NO: 12725 - DNA, 20 bp, Artificial Sequence
  Description of Artificial Sequence: Synthetic oligonucleotide
  Target: APOC3; (+) strand; PAM type: YTN; PAM sequence: CTC
ttcctcccatctaccactgg

SEQ ID NO: 12726 - DNA, 20 bp, Artificial Sequence
  Description of Artificial Sequence: Synthetic oligonucleotide
  Target: APOC3; (+) strand; PAM type: YTN; PAM sequence: CTT
cctcccatctaccactggct

SEQ ID NO: 12727 - DNA, 20 bp, Artificial Sequence
  Description of Artificial Sequence: Synthetic oligonucleotide
  Target: APOC3; (+) strand; PAM type: YTN; PAM sequence: TTC
ctcccatctaccactggctt

SEQ ID NO: 12728 - DNA, 20 bp, Artificial Sequence
  Description of Artificial Sequence: Synthetic oligonucleotide
  Target: APOC3; (+) strand; PAM type: YTN; PAM sequence: CTC
ccatctaccactggcttctc

SEQ ID NO: 12729 - DNA, 20 bp, Artificial Sequence
  Description of Artificial Sequence: Synthetic oligonucleotide
  Target: APOC3; (+) strand; PAM type: YTN; PAM sequence: CTA
ccactggcttctccctggag

SEQ ID NO: 12730 - DNA, 20 bp, Artificial Sequence
  Description of Artificial Sequence: Synthetic oligonucleotide
  Target: APOC3; (+) strand; PAM type: YTN; PAM sequence: CTG
gcttctccctggagcagtct

SEQ ID NO: 12731 - DNA, 20 bp, Artificial Sequence
  Description of Artificial Sequence: Synthetic oligonucleotide
  Target: APOC3; (+) strand; PAM type: YTN; PAM sequence: CTT
ctccctggagcagtcttcat

SEQ ID NO: 12732 - DNA, 20 bp, Artificial Sequence
  Description of Artificial Sequence: Synthetic oligonucleotide
  Target: APOC3; (+) strand; PAM type: YTN; PAM sequence: TTC
tccctggagcagtcttcatc

SEQ ID NO: 12733 - DNA, 20 bp, Artificial Sequence
  Description of Artificial Sequence: Synthetic oligonucleotide
  Target: APOC3; (+) strand; PAM type: YTN; PAM sequence: CTC
cctggagcagtcttcatccc

SEQ ID NO: 12734 - DNA, 20 bp, Artificial Sequence
  Description of Artificial Sequence: Synthetic oligonucleotide
  Target: APOC3; (+) strand; PAM type: YTN; PAM sequence: CTG
gagcagtcttcatcccaggg

SEQ ID NO: 12735 - DNA, 20 bp, Artificial Sequence
  Description of Artificial Sequence: Synthetic oligonucleotide
  Target: APOC3; (+) strand; PAM type: YTN; PAM sequence: CTT
catcccaggggagccatgat

SEQ ID NO: 12736 - DNA, 20 bp, Artificial Sequence
  Description of Artificial Sequence: Synthetic oligonucleotide
  Target: APOC3; (+) strand; PAM type: YTN; PAM sequence: TTC
atcccaggggagccatgatg

SEQ ID NO: 12737 - DNA, 20 bp, Artificial Sequence
  Description of Artificial Sequence: Synthetic oligonucleotide
  Target: APOC3; (+) strand; PAM type: YTN; PAM sequence: CTG
gccaccaagagatcccctgc

SEQ ID NO: 12738 - DNA, 20 bp, Artificial Sequence
  Description of Artificial Sequence: Synthetic oligonucleotide
  Target: APOC3; (+) strand; PAM type: YTN; PAM sequence: CTG
ccggggtgcaggttggactg

SEQ ID NO: 12739 - DNA, 20 bp, Artificial Sequence
  Description of Artificial Sequence: Synthetic oligonucleotide
  Target: APOC3; (+) strand; PAM type: YTN; PAM sequence: TTG
gactgttggtgaggggccac

SEQ ID NO: 12740 - DNA, 20 bp, Artificial Sequence
  Description of Artificial Sequence: Synthetic oligonucleotide
  Target: APOC3; (+) strand; PAM type: YTN; PAM sequence: CTG
ttggtgaggggccacaggta

SEQ ID NO: 12741 - DNA, 20 bp, Artificial Sequence
  Description of Artificial Sequence: Synthetic oligonucleotide
  Target: APOC3; (+) strand; PAM type: YTN; PAM sequence: TTG
gtgaggggccacaggtattc

SEQ ID NO: 12742 - DNA, 20 bp, Artificial Sequence
  Description of Artificial Sequence: Synthetic oligonucleotide
  Target: APOC3; (+) strand; PAM type: YTN; PAM sequence: TTC
tcaggtaccaagcccttgga

SEQ ID NO: 12743 - DNA, 20 bp, Artificial Sequence
  Description of Artificial Sequence: Synthetic oligonucleotide
  Target: APOC3; (+) strand; PAM type: YTN; PAM sequence: CTC
aggtaccaagcccttggaag

SEQ ID NO: 12744 - DNA, 20 bp, Artificial Sequence
  Description of Artificial Sequence: Synthetic oligonucleotide
  Target: APOC3; (+) strand; PAM type: YTN; PAM sequence: CTT
ggaaggagacaaggtaccag

SEQ ID NO: 12745 - DNA, 20 bp, Artificial Sequence
  Description of Artificial Sequence: Synthetic oligonucleotide
  Target: APOC3; (+) strand; PAM type: YTN; PAM sequence: TTG
gaaggagacaaggtaccagg

SEQ ID NO: 12746 - DNA, 20 bp, Artificial Sequence
  Description of Artificial Sequence: Synthetic oligonucleotide
  Target: APOC3; (+) strand; PAM type: YTN; PAM sequence: CTT
cctggaggtgtgctacatct

SEQ ID NO: 12747 - DNA, 20 bp, Artificial Sequence
  Description of Artificial Sequence: Synthetic oligonucleotide
  Target: APOC3; (+) strand; PAM type: YTN; PAM sequence: TTC
ctggaggtgtgctacatcta

SEQ ID NO: 12748 - DNA, 20 bp, Artificial Sequence
  Description of Artificial Sequence: Synthetic oligonucleotide
  Target: APOC3; (+) strand; PAM type: YTN; PAM sequence: CTG
gaggtgtgctacatctagct

SEQ ID NO: 12749 - DNA, 20 bp, Artificial Sequence
  Description of Artificial Sequence: Synthetic oligonucleotide
  Target: APOC3; (+) strand; PAM type: YTN; PAM sequence: CTA
catctagctcagcaccctgc

SEQ ID NO: 12750 - DNA, 20 bp, Artificial Sequence
  Description of Artificial Sequence: Synthetic oligonucleotide
  Target: APOC3; (+) strand; PAM type: YTN; PAM sequence: CTA
gctcagcaccctgccaggtc

SEQ ID NO: 12751 - DNA, 20 bp, Artificial Sequence
  Description of Artificial Sequence: Synthetic oligonucleotide
  Target: APOC3; (+) strand; PAM type: YTN; PAM sequence: CTC
agcaccctgccaggtctctc

SEQ ID NO: 12752 - DNA, 20 bp, Artificial Sequence
  Description of Artificial Sequence: Synthetic oligonucleotide
  Target: APOC3; (+) strand; PAM type: YTN; PAM sequence: CTG
ccaggtctctctacccacat

SEQ ID NO: 12753 - DNA, 20 bp, Artificial Sequence
  Description of Artificial Sequence: Synthetic oligonucleotide
  Target: APOC3; (+) strand; PAM type: YTN; PAM sequence: CTC
tctacccacatgtcctgacc

SEQ ID NO: 12754 - DNA, 20 bp, Artificial Sequence
  Description of Artificial Sequence: Synthetic oligonucleotide
  Target: APOC3; (+) strand; PAM type: YTN; PAM sequence: CTC
tacccacatgtcctgacctc

SEQ ID NO: 12755 - DNA, 20 bp, Artificial Sequence
  Description of Artificial Sequence: Synthetic oligonucleotide
  Target: APOC3; (+) strand; PAM type: YTN; PAM sequence: CTA
cccacatgtcctgacctccc

SEQ ID NO: 12756 - DNA, 20 bp, Artificial Sequence
  Description of Artificial Sequence: Synthetic oligonucleotide
  Target: APOC3; (+) strand; PAM type: YTN; PAM sequence: CTG
acctccctgggtccgttgcc

SEQ ID NO: 12757 - DNA, 20 bp, Artificial Sequence
  Description of Artificial Sequence: Synthetic oligonucleotide
  Target: APOC3; (+) strand; PAM type: YTN; PAM sequence: CTC
cctgggtccgttgccatgcg

SEQ ID NO: 12758 - DNA, 20 bp, Artificial Sequence
  Description of Artificial Sequence: Synthetic oligonucleotide
  Target: APOC3; (+) strand; PAM type: YTN; PAM sequence: CTG
ggtccgttgccatgcgggag

SEQ ID NO: 12759 - DNA, 20 bp, Artificial Sequence
  Description of Artificial Sequence: Synthetic oligonucleotide
  Target: APOC3; (+) strand; PAM type: YTN; PAM sequence: TTG
ccatgcgggagagagaggcc

SEQ ID NO: 12760 - DNA, 20 bp, Artificial Sequence
  Description of Artificial Sequence: Synthetic oligonucleotide
  Target: APOC3; (+) strand; PAM type: YTN; PAM sequence: CTC
ctccagaccctctgcagaga

SEQ ID NO: 12761 - DNA, 20 bp, Artificial Sequence
  Description of Artificial Sequence: Synthetic oligonucleotide
  Target: APOC3; (+) strand; PAM type: YTN; PAM sequence: CTC
cagaccctctgcagagatgg

SEQ ID NO: 12762 - DNA, 20 bp, Artificial Sequence
  Description of Artificial Sequence: Synthetic oligonucleotide
  Target: APOC3; (+) strand; PAM type: YTN; PAM sequence: CTC
tgcagagatggaaaggcttg

SEQ ID NO: 12763 - DNA, 20 bp, Artificial Sequence
  Description of Artificial Sequence: Synthetic oligonucleotide
  Target: APOC3; (+) strand; PAM type: YTN; PAM sequence: CTG
cagagatggaaaggcttgga

SEQ ID NO: 12764 - DNA, 20 bp, Artificial Sequence
  Description of Artificial Sequence: Synthetic oligonucleotide
  Target: APOC3; (+) strand; PAM type: YTN; PAM sequence: CTT
ggagggtctggggccacggg

SEQ ID NO: 12765 - DNA, 20 bp, Artificial Sequence
  Description of Artificial Sequence: Synthetic oligonucleotide
  Target: APOC3; (+) strand; PAM type: YTN; PAM sequence: TTG
gagggtctggggccacggga

SEQ ID NO: 12766 - DNA, 20 bp, Artificial Sequence
  Description of Artificial Sequence: Synthetic oligonucleotide
  Target: APOC3; (+) strand; PAM type: YTN; PAM sequence: CTG
gggccacgggaccccgccag

SEQ ID NO: 12767 - DNA, 20 bp, Artificial Sequence
  Description of Artificial Sequence: Synthetic oligonucleotide
  Target: APOC3; (+) strand; PAM type: YTN; PAM sequence: TTC
tagcacacccgggcccatag

SEQ ID NO: 12768 - DNA, 20 bp, Artificial Sequence
  Description of Artificial Sequence: Synthetic oligonucleotide
  Target: APOC3; (+) strand; PAM type: YTN; PAM sequence: CTA
gcacacccgggcccatagac

SEQ ID NO: 12769 - DNA, 20 bp, Artificial Sequence
  Description of Artificial Sequence: Synthetic oligonucleotide
  Target: APOC3; (+) strand; PAM type: YTN; PAM sequence: CTT
gttgcctgcccctgcctgga

SEQ ID NO: 12770 - DNA, 20 bp, Artificial Sequence
  Description of Artificial Sequence: Synthetic oligonucleotide
  Target: APOC3; (+) strand; PAM type: YTN; PAM sequence: TTG
ttgcctgcccctgcctggat

SEQ ID NO: 12771 - DNA, 20 bp, Artificial Sequence
  Description of Artificial Sequence: Synthetic oligonucleotide
  Target: APOC3; (+) strand; PAM type: YTN; PAM sequence: TTG
cctgcccctgcctggatctg

SEQ ID NO: 12772 - DNA, 20 bp, Artificial Sequence
  Description of Artificial Sequence: Synthetic oligonucleotide
  Target: APOC3; (+) strand; PAM type: YTN; PAM sequence: CTG
cccctgcctggatctgggtc

SEQ ID NO: 12773 - DNA, 20 bp, Artificial Sequence
  Description of Artificial Sequence: Synthetic oligonucleotide
  Target: APOC3; (+) strand; PAM type: YTN; PAM sequence: CTG
cctggatctgggtccccact

SEQ ID NO: 12774 - DNA, 20 bp, Artificial Sequence
  Description of Artificial Sequence: Synthetic oligonucleotide
  Target: APOC3; (+) strand; PAM type: YTN; PAM sequence: CTG
gatctgggtccccactgtgc

SEQ ID NO: 12775 - DNA, 20 bp, Artificial Sequence
  Description of Artificial Sequence: Synthetic oligonucleotide
  Target: APOC3; (+) strand; PAM type: YTN; PAM sequence: CTG
ggtccccactgtgcctttgc

SEQ ID NO: 12776 - DNA, 20 bp, Artificial Sequence
  Description of Artificial Sequence: Synthetic oligonucleotide
  Target: APOC3; (+) strand; PAM type: YTN; PAM sequence: CTG
tgcctttgcctctggggcta

SEQ ID NO: 12777 - DNA, 20 bp, Artificial Sequence
  Description of Artificial Sequence: Synthetic oligonucleotide
  Target: APOC3; (+) strand; PAM type: YTN; PAM sequence: CTT
tgcctctggggctatggagc

SEQ ID NO: 12778 - DNA, 20 bp, Artificial Sequence
  Description of Artificial Sequence: Synthetic oligonucleotide
  Target: APOC3; (+) strand; PAM type: YTN; PAM sequence: TTT
gcctctggggctatggagca

SEQ ID NO: 12779 - DNA, 20 bp, Artificial Sequence
  Description of Artificial Sequence: Synthetic oligonucleotide
  Target: APOC3; (+) strand; PAM type: YTN; PAM sequence: TTG
cctctggggctatggagcag

SEQ ID NO: 12780 - DNA, 20 bp, Artificial Sequence
  Description of Artificial Sequence: Synthetic oligonucleotide
  Target: APOC3; (+) strand; PAM type: YTN; PAM sequence: CTC
tggggctatggagcaggccg

SEQ ID NO: 12781 - DNA, 20 bp, Artificial Sequence
  Description of Artificial Sequence: Synthetic oligonucleotide
  Target: APOC3; (+) strand; PAM type: YTN; PAM sequence: CTG
gggctatggagcaggccgca

SEQ ID NO: 12782 - DNA, 20 bp, Artificial Sequence
  Description of Artificial Sequence: Synthetic oligonucleotide
  Target: APOC3; (+) strand; PAM type: YTN; PAM sequence: CTA
tggagcaggccgcagcagaa

SEQ ID NO: 12783 - DNA, 20 bp, Artificial Sequence
  Description of Artificial Sequence: Synthetic oligonucleotide
  Target: APOC3; (+) strand; PAM type: YTN; PAM sequence: CTC
cagtgaccacttcttcacct

SEQ ID NO: 12784 - DNA, 20 bp, Artificial Sequence
  Description of Artificial Sequence: Synthetic oligonucleotide
  Target: APOC3; (+) strand; PAM type: YTN; PAM sequence: CTT
cttcaccttctaccccacca

SEQ ID NO: 12785 - DNA, 20 bp, Artificial Sequence
  Description of Artificial Sequence: Synthetic oligonucleotide
  Target: APOC3; (+) strand; PAM type: YTN; PAM sequence: TTC
ttcaccttctaccccaccac

SEQ ID NO: 12786 - DNA, 20 bp, Artificial Sequence
  Description of Artificial Sequence: Synthetic oligonucleotide
  Target: APOC3; (+) strand; PAM type: YTN; PAM sequence: CTT
caccttctaccccaccacca

SEQ ID NO: 12787 - DNA, 20 bp, Artificial Sequence
  Description of Artificial Sequence: Synthetic oligonucleotide
  Target: APOC3; (+) strand; PAM type: YTN; PAM sequence: TTC
accttctaccccaccaccaa

SEQ ID NO: 12788 - DNA, 20 bp, Artificial Sequence
  Description of Artificial Sequence: Synthetic oligonucleotide
  Target: APOC3; (+) strand; PAM type: YTN; PAM sequence: CTT
ctaccccaccaccaaagtct

SEQ ID NO: 12789 - DNA, 20 bp, Artificial Sequence
  Description of Artificial Sequence: Synthetic oligonucleotide
  Target: APOC3; (+) strand; PAM type: YTN; PAM sequence: TTC
taccccaccaccaaagtctg

SEQ ID NO: 12790 - DNA, 20 bp, Artificial Sequence
  Description of Artificial Sequence: Synthetic oligonucleotide
  Target: APOC3; (+) strand; PAM type: YTN; PAM sequence: CTA
ccccaccaccaaagtctgca

SEQ ID NO: 12791 - DNA, 20 bp, Artificial Sequence
  Description of Artificial Sequence: Synthetic oligonucleotide
  Target: APOC3; (+) strand; PAM type: YTN; PAM sequence: CTG
caggagacttgagacaggtt

SEQ ID NO: 12792 - DNA, 20 bp, Artificial Sequence
  Description of Artificial Sequence: Synthetic oligonucleotide
  Target: APOC3; (+) strand; PAM type: YTN; PAM sequence: CTT
gagacaggtttgttctgggc

SEQ ID NO: 12793 - DNA, 20 bp, Artificial Sequence
  Description of Artificial Sequence: Synthetic oligonucleotide
  Target: APOC3; (+) strand; PAM type: YTN; PAM sequence: TTG
agacaggtttgttctgggcg

SEQ ID NO: 12794 - DNA, 20 bp, Artificial Sequence
  Description of Artificial Sequence: Synthetic oligonucleotide
  Target: APOC3; (+) strand; PAM type: YTN; PAM sequence: TTT
gttctgggcgtgtgactgat

SEQ ID NO: 12795 - DNA, 20 bp, Artificial Sequence
  Description of Artificial Sequence: Synthetic oligonucleotide
  Target: APOC3; (+) strand; PAM type: YTN; PAM sequence: TTG
ttctgggcgtgtgactgatg

SEQ ID NO: 12796 - DNA, 20 bp, Artificial Sequence
  Description of Artificial Sequence: Synthetic oligonucleotide
  Target: APOC3; (+) strand; PAM type: YTN; PAM sequence: TTC
tgggcgtgtgactgatgcct

SEQ ID NO: 12797 - DNA, 20 bp, Artificial Sequence
  Description of Artificial Sequence: Synthetic oligonucleotide
  Target: APOC3; (+) strand; PAM type: YTN; PAM sequence: CTG
ggcgtgtgactgatgcctct

SEQ ID NO: 12798 - DNA, 20 bp, Artificial Sequence
  Description of Artificial Sequence: Synthetic oligonucleotide
  Target: APOC3; (+) strand; PAM type: YTN; PAM sequence: CTG
atgcctctataggggtctca

SEQ ID NO: 12799 - DNA, 20 bp, Artificial Sequence
  Description of Artificial Sequence: Synthetic oligonucleotide
  Target: APOC3; (+) strand; PAM type: YTN; PAM sequence: CTC
tataggggtctcagtgctct

SEQ ID NO: 12800 - DNA, 20 bp, Artificial Sequence
  Description of Artificial Sequence: Synthetic oligonucleotide
  Target: APOC3; (+) strand; PAM type: YTN; PAM sequence: CTA
taggggtctcagtgctctaa

SEQ ID NO: 12801 - DNA, 20 bp, Artificial Sequence
  Description of Artificial Sequence: Synthetic oligonucleotide
  Target: APOC3; (+) strand; PAM type: YTN; PAM sequence: CTC
agtgctctaagccgtctggt

SEQ ID NO: 12802 - DNA, 20 bp, Artificial Sequence
  Description of Artificial Sequence: Synthetic oligonucleotide
  Target: APOC3; (+) strand; PAM type: YTN; PAM sequence: CTC
taagccgtctggtatttgcc

SEQ ID NO: 12803 - DNA, 20 bp, Artificial Sequence
  Description of Artificial Sequence: Synthetic oligonucleotide
  Target: APOC3; (+) strand; PAM type: YTN; PAM sequence: CTA
agccgtctggtatttgcctg

SEQ ID NO: 12804 - DNA, 20 bp, Artificial Sequence
  Description of Artificial Sequence: Synthetic oligonucleotide
  Target: APOC3; (+) strand; PAM type: YTN; PAM sequence: CTG
gtatttgcctggggtgtgtg

SEQ ID NO: 12805 - DNA, 20 bp, Artificial Sequence
  Description of Artificial Sequence: Synthetic oligonucleotide
  Target: APOC3; (+) strand; PAM type: YTN; PAM sequence: TTT
gcctggggtgtgtgaagacc

SEQ ID NO: 12806 - DNA, 20 bp, Artificial Sequence
  Description of Artificial Sequence: Synthetic oligonucleotide
  Target: APOC3; (+) strand; PAM type: YTN; PAM sequence: TTG
cctggggtgtgtgaagacct

SEQ ID NO: 12807 - DNA, 20 bp, Artificial Sequence
  Description of Artificial Sequence: Synthetic oligonucleotide
  Target: APOC3; (+) strand; PAM type: YTN; PAM sequence: CTG
gggtgtgtgaagacctggat

SEQ ID NO: 12808 - DNA, 20 bp, Artificial Sequence
  Description of Artificial Sequence: Synthetic oligonucleotide
  Target: APOC3; (+) strand; PAM type: YTN; PAM sequence: CTG
gattaaggttcccagcctta

SEQ ID NO: 12809 - DNA, 20 bp, Artificial Sequence
  Description of Artificial Sequence: Synthetic oligonucleotide
  Target: APOC3; (+) strand; PAM type: YTN; PAM sequence: TTA
aggttcccagccttactact

SEQ ID NO: 12810 - DNA, 20 bp, Artificial Sequence
  Description of Artificial Sequence: Synthetic oligonucleotide
  Target: APOC3; (+) strand; PAM type: YTN; PAM sequence: TTC
ccagccttactactaatggg

SEQ ID NO: 12811 - DNA, 20 bp, Artificial Sequence
  Description of Artificial Sequence: Synthetic oligonucleotide
  Target: APOC3; (+) strand; PAM type: YTN; PAM sequence: CTT
actactaatgggctgtgcac

SEQ ID NO: 12812 - DNA, 20 bp, Artificial Sequence
  Description of Artificial Sequence: Synthetic oligonucleotide
  Target: APOC3; (+) strand; PAM type: YTN; PAM sequence: TTA
ctactaatgggctgtgcact

SEQ ID NO: 12813 - DNA, 20 bp, Artificial Sequence
  Description of Artificial Sequence: Synthetic oligonucleotide
  Target: APOC3; (+) strand; PAM type: YTN; PAM sequence: CTA
ctaatgggctgtgcacttgg

SEQ ID NO: 12814 - DNA, 20 bp, Artificial Sequence
  Description of Artificial Sequence: Synthetic oligonucleotide
  Target: APOC3; (+) strand; PAM type: YTN; PAM sequence: CTA
atgggctgtgcacttggagc

SEQ ID NO: 12815 - DNA, 20 bp, Artificial Sequence
  Description of Artificial Sequence: Synthetic oligonucleotide
  Target: APOC3; (+) strand; PAM type: YTN; PAM sequence: CTG
tgcacttggagcccttagag

SEQ ID NO: 12816 - DNA, 20 bp, Artificial Sequence
  Description of Artificial Sequence: Synthetic oligonucleotide
  Target: APOC3; (+) strand; PAM type: YTN; PAM sequence: CTT
ggagcccttagagccttagg

SEQ ID NO: 12817 - DNA, 20 bp, Artificial Sequence
  Description of Artificial Sequence: Synthetic oligonucleotide
  Target: APOC3; (+) strand; PAM type: YTN; PAM sequence: TTG
gagcccttagagccttaggt

SEQ ID NO: 12818 - DNA, 20 bp, Artificial Sequence
  Description of Artificial Sequence: Synthetic oligonucleotide
  Target: APOC3; (+) strand; PAM type: YTN; PAM sequence: CTT
agagccttaggtttctaacc

SEQ ID NO: 12819 - DNA, 20 bp, Artificial Sequence
  Description of Artificial Sequence: Synthetic oligonucleotide
  Target: APOC3; (+) strand; PAM type: YTN; PAM sequence: TTA
gagccttaggtttctaacct

SEQ ID NO: 12820 - DNA, 20 bp, Artificial Sequence
  Description of Artificial Sequence: Synthetic oligonucleotide
  Target: APOC3; (+) strand; PAM type: YTN; PAM sequence: CTT
aggtttctaacctataaaat

SEQ ID NO: 12821 - DNA, 20 bp, Artificial Sequence
  Description of Artificial Sequence: Synthetic oligonucleotide
  Target: APOC3; (+) strand; PAM type: YTN; PAM sequence: TTA
ggtttctaacctataaaatg

SEQ ID NO: 12822 - DNA, 20 bp, Artificial Sequence
  Description of Artificial Sequence: Synthetic oligonucleotide
  Target: APOC3; (+) strand; PAM type: YTN; PAM sequence: TTT
ctaacctataaaatggactt

SEQ ID NO: 12823 - DNA, 20 bp, Artificial Sequence
  Description of Artificial Sequence: Synthetic oligonucleotide
  Target: APOC3; (+) strand; PAM type: YTN; PAM sequence: TTC
taacctataaaatggactta

SEQ ID NO: 12824 - DNA, 20 bp, Artificial Sequence
  Description of Artificial Sequence: Synthetic oligonucleotide
  Target: APOC3; (+) strand; PAM type: YTN; PAM sequence: CTA
acctataaaatggacttaac

SEQ ID NO: 12825 - DNA, 20 bp, Artificial Sequence
  Description of Artificial Sequence: Synthetic oligonucleotide
  Target: APOC3; (+) strand; PAM type: YTN; PAM sequence: CTA
taaaatggacttaacgtcta

SEQ ID NO: 12826 - DNA, 20 bp, Artificial Sequence
  Description of Artificial Sequence: Synthetic oligonucleotide
  Target: APOC3; (+) strand; PAM type: YTN; PAM sequence: CTT
aacgtctacttcacagggtt

SEQ ID NO: 12827 - DNA, 20 bp, Artificial Sequence
  Description of Artificial Sequence: Synthetic oligonucleotide
  Target: APOC3; (+) strand; PAM type: YTN; PAM sequence: TTA
acgtctacttcacagggttc

SEQ ID NO: 12828 - DNA, 20 bp, Artificial Sequence
  Description of Artificial Sequence: Synthetic oligonucleotide
  Target: APOC3; (+) strand; PAM type: YTN; PAM sequence: CTA
cttcacagggttctatttgc

SEQ ID NO: 12829 - DNA, 20 bp, Artificial Sequence
  Description of Artificial Sequence: Synthetic oligonucleotide
  Target: APOC3; (+) strand; PAM type: YTN; PAM sequence: CTT
cacagggttctatttgcatt

SEQ ID NO: 12830 - DNA, 20 bp, Artificial Sequence
  Description of Artificial Sequence: Synthetic oligonucleotide
  Target: APOC3; (+) strand; PAM type: YTN; PAM sequence: TTC
acagggttctatttgcattt

SEQ ID NO: 12831 - DNA, 20 bp, Artificial Sequence
  Description of Artificial Sequence: Synthetic oligonucleotide
  Target: APOC3; (+) strand; PAM type: YTN; PAM sequence: TTC
tatttgcattttaacagaaa

SEQ ID NO: 12832 - DNA, 20 bp, Artificial Sequence
  Description of Artificial Sequence: Synthetic oligonucleotide
  Target: APOC3; (+) strand; PAM type: YTN; PAM sequence: CTA
tttgcattttaacagaaaac

SEQ ID NO: 12833 - DNA, 20 bp, Artificial Sequence
  Description of Artificial Sequence: Synthetic oligonucleotide
  Target: APOC3; (+) strand; PAM type: YTN; PAM sequence: TTT
gcattttaacagaaaacaaa

SEQ ID NO: 12834 - DNA, 20 bp, Artificial Sequence
  Description of Artificial Sequence: Synthetic oligonucleotide
  Target: APOC3; (+) strand; PAM type: YTN; PAM sequence: TTG
cattttaacagaaaacaaag

SEQ ID NO: 12835 - DNA, 20 bp, Artificial Sequence
  Description of Artificial Sequence: Synthetic oligonucleotide
  Target: APOC3; (+) strand; PAM type: YTN; PAM sequence: TTT
taacagaaaacaaagtctta

SEQ ID NO: 12836 - DNA, 20 bp, Artificial Sequence
  Description of Artificial Sequence: Synthetic oligonucleotide
  Target: APOC3; (+) strand; PAM type: YTN; PAM sequence: TTT
aacagaaaacaaagtcttaa

SEQ ID NO: 12837 - DNA, 20 bp, Artificial Sequence
  Description of Artificial Sequence: Synthetic oligonucleotide
  Target: APOC3; (+) strand; PAM type: YTN; PAM sequence: TTA
acagaaaacaaagtcttaag

SEQ ID NO: 12838 - DNA, 20 bp, Artificial Sequence
  Description of Artificial Sequence: Synthetic oligonucleotide
  Target: APOC3; (+) strand; PAM type: YTN; PAM sequence: CTT
aagtcaaaggaatgaatctc

SEQ ID NO: 12839 - DNA, 20 bp, Artificial Sequence
  Description of Artificial Sequence: Synthetic oligonucleotide
  Target: APOC3; (+) strand; PAM type: YTN; PAM sequence: TTA
agtcaaaggaatgaatctct

SEQ ID NO: 12840 - DNA, 20 bp, Artificial Sequence
  Description of Artificial Sequence: Synthetic oligonucleotide
  Target: APOC3; (+) strand; PAM type: YTN; PAM sequence: CTC
tctctctctctctctctctc

SEQ ID NO: 12841 - DNA, 20 bp, Artificial Sequence
  Description of Artificial Sequence: Synthetic oligonucleotide
  Target: APOC3; (+) strand; PAM type: YTN; PAM sequence: CTC
tctctctctctctctctctt

SEQ ID NO: 12842 - DNA, 20 bp, Artificial Sequence
  Description of Artificial Sequence: Synthetic oligonucleotide
  Target: APOC3; (+) strand; PAM type: YTN; PAM sequence: CTC
tctctctctctctctctttt

SEQ ID NO: 12843 - DNA, 20 bp, Artificial Sequence
  Description of Artificial Sequence: Synthetic oligonucleotide
  Target: APOC3; (+) strand; PAM type: YTN; PAM sequence: CTC
tctctctctctctctttttt

SEQ ID NO: 12844 - DNA, 20 bp, Artificial Sequence
  Description of Artificial Sequence: Synthetic oligonucleotide
  Target: APOC3; (+) strand; PAM type: YTN; PAM sequence: CTC
tctctctctctcttttttag

SEQ ID NO: 12845 - DNA, 20 bp, Artificial Sequence
  Description of Artificial Sequence: Synthetic oligonucleotide
  Target: APOC3; (+) strand; PAM type: YTN; PAM sequence: CTC
tctctctctcttttttagac

SEQ ID NO: 12846 - DNA, 20 bp, Artificial Sequence
  Description of Artificial Sequence: Synthetic oligonucleotide
  Target: APOC3; (+) strand; PAM type: YTN; PAM sequence: CTC
tctctctcttttttagacca

SEQ ID NO: 12847 - DNA, 20 bp, Artificial Sequence
  Description of Artificial Sequence: Synthetic oligonucleotide
  Target: APOC3; (+) strand; PAM type: YTN; PAM sequence: CTC
tctctcttttttagaccaag

SEQ ID NO: 12848 - DNA, 20 bp, Artificial Sequence
  Description of Artificial Sequence: Synthetic oligonucleotide
  Target: APOC3; (+) strand; PAM type: YTN; PAM sequence: CTC
tctcttttttagaccaagtc

SEQ ID NO: 12849 - DNA, 20 bp, Artificial Sequence
  Description of Artificial Sequence: Synthetic oligonucleotide
  Target: APOC3; (+) strand; PAM type: YTN; PAM sequence: CTC
tcttttttagaccaagtcta

SEQ ID NO: 12850 - DNA, 20 bp, Artificial Sequence
  Description of Artificial Sequence: Synthetic oligonucleotide
  Target: APOC3; (+) strand; PAM type: YTN; PAM sequence: CTC
ttttttagaccaagtctagc

SEQ ID NO: 12851 - DNA, 20 bp, Artificial Sequence
  Description of Artificial Sequence: Synthetic oligonucleotide
  Target: APOC3; (+) strand; PAM type: YTN; PAM sequence: CTT
ttttagaccaagtctagctc

SEQ ID NO: 12852 - DNA, 20 bp, Artificial Sequence
  Description of Artificial Sequence: Synthetic oligonucleotide
  Target: APOC3; (+) strand; PAM type: YTN; PAM sequence: TTT
tttagaccaagtctagctct

SEQ ID NO: 12853 - DNA, 20 bp, Artificial Sequence
  Description of Artificial Sequence: Synthetic oligonucleotide
  Target: APOC3; (+) strand; PAM type: YTN; PAM sequence: TTT
ttagaccaagtctagctctg

SEQ ID NO: 12854 - DNA, 20 bp, Artificial Sequence
  Description of Artificial Sequence: Synthetic oligonucleotide
  Target: APOC3; (+) strand; PAM type: YTN; PAM sequence: TTT
tagaccaagtctagctctgt

SEQ ID NO: 12855 - DNA, 20 bp, Artificial Sequence
  Description of Artificial Sequence: Synthetic oligonucleotide
  Target: APOC3; (+) strand; PAM type: YTN; PAM sequence: TTT
agaccaagtctagctctgtc

SEQ ID NO: 12856 - DNA, 20 bp, Artificial Sequence
  Description of Artificial Sequence: Synthetic oligonucleotide
  Target: APOC3; (+) strand; PAM type: YTN; PAM sequence: TTA
gaccaagtctagctctgtca

SEQ ID NO: 12857 - DNA, 20 bp, Artificial Sequence
  Description of Artificial Sequence: Synthetic oligonucleotide
  Target: APOC3; (+) strand; PAM type: YTN; PAM sequence: CTA
gctctgtcactggagtgcaa

SEQ ID NO: 12858 - DNA, 20 bp, Artificial Sequence
  Description of Artificial Sequence: Synthetic oligonucleotide
  Target: APOC3; (+) strand; PAM type: YTN; PAM sequence: CTC
tgtcactggagtgcaatggt

SEQ ID NO: 12859 - DNA, 20 bp, Artificial Sequence
  Description of Artificial Sequence: Synthetic oligonucleotide
  Target: APOC3; (+) strand; PAM type: YTN; PAM sequence: CTG
tcactggagtgcaatggtgc

SEQ ID NO: 12860 - DNA, 20 bp, Artificial Sequence
  Description of Artificial Sequence: Synthetic oligonucleotide
  Target: APOC3; (+) strand; PAM type: YTN; PAM sequence: CTG
gagtgcaatggtgcgatctc

SEQ ID NO: 12861 - DNA, 20 bp, Artificial Sequence
  Description of Artificial Sequence: Synthetic oligonucleotide
  Target: APOC3; (+) strand; PAM type: YTN; PAM sequence: CTC
tgctcactgcaacctccacc

SEQ ID NO: 12862 - DNA, 20 bp, Artificial Sequence
  Description of Artificial Sequence: Synthetic oligonucleotide
  Target: APOC3; (+) strand; PAM type: YTN; PAM sequence: CTG
ctcactgcaacctccacctc

SEQ ID NO: 12863 - DNA, 20 bp, Artificial Sequence
  Description of Artificial Sequence: Synthetic oligonucleotide
  Target: APOC3; (+) strand; PAM type: YTN; PAM sequence: CTC
actgcaacctccacctccgg

SEQ ID NO: 12864 - DNA, 20 bp, Artificial Sequence
  Description of Artificial Sequence: Synthetic oligonucleotide
  Target: APOC3; (+) strand; PAM type: YTN; PAM sequence: CTG
caacctccacctccggggtt

SEQ ID NO: 12865 - DNA, 20 bp, Artificial Sequence
  Description of Artificial Sequence: Synthetic oligonucleotide
  Target: APOC3; (+) strand; PAM type: YTN; PAM sequence: CTC
cacctccggggttcaagcaa

SEQ ID NO: 12866 - DNA, 20 bp, Artificial Sequence
  Description of Artificial Sequence: Synthetic oligonucleotide
  Target: APOC3; (+) strand; PAM type: YTN; PAM sequence: CTC
cggggttcaagcaattctcg

SEQ ID NO: 12867 - DNA, 20 bp, Artificial Sequence
  Description of Artificial Sequence: Synthetic oligonucleotide
  Target: APOC3; (+) strand; PAM type: YTN; PAM sequence: TTC
aagcaattctcgtgcctcag

SEQ ID NO: 12868 - DNA, 20 bp, Artificial Sequence
  Description of Artificial Sequence: Synthetic oligonucleotide
  Target: APOC3; (+) strand; PAM type: YTN; PAM sequence: TTC
tcgtgcctcagcctcctgag

SEQ ID NO: 12869 - DNA, 20 bp, Artificial Sequence
  Description of Artificial Sequence: Synthetic oligonucleotide
  Target: APOC3; (+) strand; PAM type: YTN; PAM sequence: CTC
gtgcctcagcctcctgagta

SEQ ID NO: 12870 - DNA, 20 bp, Artificial Sequence
  Description of Artificial Sequence: Synthetic oligonucleotide
  Target: APOC3; (+) strand; PAM type: YTN; PAM sequence: CTC
agcctcctgagtagctggga

SEQ ID NO: 12871 - DNA, 20 bp, Artificial Sequence
  Description of Artificial Sequence: Synthetic oligonucleotide
  Target: APOC3; (+) strand; PAM type: YTN; PAM sequence: CTC
ctgagtagctgggactacag

SEQ ID NO: 12872 - DNA, 20 bp, Artificial Sequence
  Description of Artificial Sequence: Synthetic oligonucleotide
  Target: APOC3; (+) strand; PAM type: YTN; PAM sequence: CTG
agtagctgggactacaggcg

SEQ ID NO: 12873 - DNA, 20 bp, Artificial Sequence
  Description of Artificial Sequence: Synthetic oligonucleotide
  Target: APOC3; (+) strand; PAM type: YTN; PAM sequence: CTG
ggactacaggcgtgcatcac

SEQ ID NO: 12874 - DNA, 20 bp, Artificial Sequence
  Description of Artificial Sequence: Synthetic oligonucleotide
  Target: APOC3; (+) strand; PAM type: YTN; PAM sequence: CTA
caggcgtgcatcaccatgct

SEQ ID NO: 12875 - DNA, 20 bp, Artificial Sequence
  Description of Artificial Sequence: Synthetic oligonucleotide
  Target: APOC3; (+) strand; PAM type: YTN; PAM sequence: CTC
ggctaattttttgtattttt

SEQ ID NO: 12876 - DNA, 20 bp, Artificial Sequence
  Description of Artificial Sequence: Synthetic oligonucleotide
  Target: APOC3; (+) strand; PAM type: YTN; PAM sequence: CTA
attttttgtatttttagtag

SEQ ID NO: 12877 - DNA, 20 bp, Artificial Sequence
  Description of Artificial Sequence: Synthetic oligonucleotide
  Target: APOC3; (+) strand; PAM type: YTN; PAM sequence: TTT
tttgtatttttagtagagac

SEQ ID NO: 12878 - DNA, 20 bp, Artificial Sequence
  Description of Artificial Sequence: Synthetic oligonucleotide
  Target: APOC3; (+) strand; PAM type: YTN; PAM sequence: TTT
ttgtatttttagtagagact

SEQ ID NO: 12879 - DNA, 20 bp, Artificial Sequence
  Description of Artificial Sequence: Synthetic oligonucleotide
  Target: APOC3; (+) strand; PAM type: YTN; PAM sequence: TTT
tgtatttttagtagagactg

SEQ ID NO: 12880 - DNA, 20 bp, Artificial Sequence
  Description of Artificial Sequence: Synthetic oligonucleotide
  Target: APOC3; (+) strand; PAM type: YTN; PAM sequence: TTT
gtatttttagtagagactgg

SEQ ID NO: 12881 - DNA, 20 bp, Artificial Sequence
  Description of Artificial Sequence: Synthetic oligonucleotide
  Target: APOC3; (+) strand; PAM type: YTN; PAM sequence: TTG
tatttttagtagagactggg

SEQ ID NO: 12882 - DNA, 20 bp, Artificial Sequence
  Description of Artificial Sequence: Synthetic oligonucleotide
  Target: APOC3; (+) strand; PAM type: YTN; PAM sequence: TTT
ttagtagagactgggtttcg

SEQ ID NO: 12883 - DNA, 20 bp, Artificial Sequence
  Description of Artificial Sequence: Synthetic oligonucleotide
  Target: APOC3; (+) strand; PAM type: YTN; PAM sequence: TTT
tagtagagactgggtttcgc

SEQ ID NO: 12884 - DNA, 20 bp, Artificial Sequence
  Description of Artificial Sequence: Synthetic oligonucleotide
  Target: APOC3; (+) strand; PAM type: YTN; PAM sequence: TTT
agtagagactgggtttcgcc

SEQ ID NO: 12885 - DNA, 20 bp, Artificial Sequence
  Description of Artificial Sequence: Synthetic oligonucleotide
  Target: APOC3; (+) strand; PAM type: YTN; PAM sequence: TTA
gtagagactgggtttcgcca

SEQ ID NO: 12886 - DNA, 20 bp, Artificial Sequence
  Description of Artificial Sequence: Synthetic oligonucleotide
  Target: APOC3; (+) strand; PAM type: YTN; PAM sequence: CTG
ggtttcgccatgttgcccag

SEQ ID NO: 12887 - DNA, 20 bp, Artificial Sequence
  Description of Artificial Sequence: Synthetic oligonucleotide
  Target: APOC3; (+) strand; PAM type: YTN; PAM sequence: TTT
cgccatgttgcccaggctgg

SEQ ID NO: 12888 - DNA, 20 bp, Artificial Sequence
  Description of Artificial Sequence: Synthetic oligonucleotide
  Target: APOC3; (+) strand; PAM type: YTN; PAM sequence: TTC
gccatgttgcccaggctggt

SEQ ID NO: 12889 - DNA, 20 bp, Artificial Sequence
  Description of Artificial Sequence: Synthetic oligonucleotide
  Target: APOC3; (+) strand; PAM type: YTN; PAM sequence: TTG
cccaggctggtctcgaactc

SEQ ID NO: 12890 - DNA, 20 bp, Artificial Sequence
  Description of Artificial Sequence: Synthetic oligonucleotide
  Target: APOC3; (+) strand; PAM type: YTN; PAM sequence: CTG
gtctcgaactcctggcctca

SEQ ID NO: 12891 - DNA, 20 bp, Artificial Sequence
  Description of Artificial Sequence: Synthetic oligonucleotide
  Target: APOC3; (+) strand; PAM type: YTN; PAM sequence: CTC
gaactcctggcctcagatat

SEQ ID NO: 12892 - DNA, 20 bp, Artificial Sequence
  Description of Artificial Sequence: Synthetic oligonucleotide
  Target: APOC3; (+) strand; PAM type: YTN; PAM sequence: CTC
ctggcctcagatatccgtcc

SEQ ID NO: 12893 - DNA, 20 bp, Artificial Sequence
  Description of Artificial Sequence: Synthetic oligonucleotide
  Target: APOC3; (+) strand; PAM type: YTN; PAM sequence: CTG
gcctcagatatccgtccgtc

SEQ ID NO: 12894 - DNA, 20 bp, Artificial Sequence
  Description of Artificial Sequence: Synthetic oligonucleotide
  Target: APOC3; (+) strand; PAM type: YTN; PAM sequence: CTC
agatatccgtccgtcccagc

SEQ ID NO: 12895 - DNA, 20 bp, Artificial Sequence
  Description of Artificial Sequence: Synthetic oligonucleotide
  Target: APOC3; (+) strand; PAM type: YTN; PAM sequence: CTC
ccaaagtgctgggattacag

SEQ ID NO: 12896 - DNA, 20 bp, Artificial Sequence
  Description of Artificial Sequence: Synthetic oligonucleotide
  Target: APOC3; (+) strand; PAM type: YTN; PAM sequence: CTG
ggattacaggcatgagccac

SEQ ID NO: 12897 - DNA, 20 bp, Artificial Sequence
  Description of Artificial Sequence: Synthetic oligonucleotide
  Target: APOC3; (+) strand; PAM type: YTN; PAM sequence: TTA
caggcatgagccactgtgcc

SEQ ID NO: 12898 - DNA, 20 bp, Artificial Sequence
  Description of Artificial Sequence: Synthetic oligonucleotide
  Target: APOC3; (+) strand; PAM type: YTN; PAM sequence: CTG
tgcccagccaggaatggatc

SEQ ID NO: 12899 - DNA, 20 bp, Artificial Sequence
  Description of Artificial Sequence: Synthetic oligonucleotide
  Target: APOC3; (+) strand; PAM type: YTN; PAM sequence: CTA
atagaggaattccaagtctc

SEQ ID NO: 12900 - DNA, 20 bp, Artificial Sequence
  Description of Artificial Sequence: Synthetic oligonucleotide
  Target: APOC3; (+) strand; PAM type: YTN; PAM sequence: TTC
caagtctcacccaccgataa

SEQ ID NO: 12901 - DNA, 20 bp, Artificial Sequence
  Description of Artificial Sequence: Synthetic oligonucleotide
  Target: APOC3; (+) strand; PAM type: YTN; PAM sequence: CTC
acccaccgataaagaattct

SEQ ID NO: 12902 - DNA, 20 bp, Artificial Sequence
  Description of Artificial Sequence: Synthetic oligonucleotide
  Target: APOC3; (+) strand; PAM type: YTN; PAM sequence: TTC
tgagggcagagccgggccac

SEQ ID NO: 12903 - DNA, 20 bp, Artificial Sequence
  Description of Artificial Sequence: Synthetic oligonucleotide
  Target: APOC3; (+) strand; PAM type: YTN; PAM sequence: CTG
agggcagagccgggccactt

SEQ ID NO: 12904 - DNA, 20 bp, Artificial Sequence
  Description of Artificial Sequence: Synthetic oligonucleotide
  Target: APOC3; (+) strand; PAM type: YTN; PAM sequence: CTT
tctcaggcctctgatttcat

SEQ ID NO: 12905 - DNA, 20 bp, Artificial Sequence
  Description of Artificial Sequence: Synthetic oligonucleotide
  Target: APOC3; (+) strand; PAM type: YTN; PAM sequence: TTT
ctcaggcctctgatttcata

SEQ ID NO: 12906 - DNA, 20 bp, Artificial Sequence
  Description of Artificial Sequence: Synthetic oligonucleotide
  Target: APOC3; (+) strand; PAM type: YTN; PAM sequence: TTC
tcaggcctctgatttcatac

SEQ ID NO: 12907 - DNA, 20 bp, Artificial Sequence
  Description of Artificial Sequence: Synthetic oligonucleotide
  Target: APOC3; (+) strand; PAM type: YTN; PAM sequence: CTC
aggcctctgatttcatactg

SEQ ID NO: 12908 - DNA, 20 bp, Artificial Sequence
  Description of Artificial Sequence: Synthetic oligonucleotide
  Target: APOC3; (+) strand; PAM type: YTN; PAM sequence: CTC
tgatttcatactgtggtgtt

SEQ ID NO: 12909 - DNA, 20 bp, Artificial Sequence
  Description of Artificial Sequence: Synthetic oligonucleotide
  Target: APOC3; (+) strand; PAM type: YTN; PAM sequence: CTG
atttcatactgtggtgttag

SEQ ID NO: 12910 - DNA, 20 bp, Artificial Sequence
  Description of Artificial Sequence: Synthetic oligonucleotide
  Target: APOC3; (+) strand; PAM type: YTN; PAM sequence: TTT
catactgtggtgttagttac

SEQ ID NO: 12911 - DNA, 20 bp, Artificial Sequence
  Description of Artificial Sequence: Synthetic oligonucleotide
  Target: APOC3; (+) strand; PAM type: YTN; PAM sequence: TTC
atactgtggtgttagttact

SEQ ID NO: 12912 - DNA, 20 bp, Artificial Sequence
  Description of Artificial Sequence: Synthetic oligonucleotide
  Target: APOC3; (+) strand; PAM type: YTN; PAM sequence: CTG
tggtgttagttacttctgag

SEQ ID NO: 12913 - DNA, 20 bp, Artificial Sequence
  Description of Artificial Sequence: Synthetic oligonucleotide
  Target: APOC3; (+) strand; PAM type: YTN; PAM sequence: TTA
gttacttctgagaggacagc

SEQ ID NO: 12914 - DNA, 20 bp, Artificial Sequence
  Description of Artificial Sequence: Synthetic oligonucleotide
  Target: APOC3; (+) strand; PAM type: YTN; PAM sequence: TTA
cttctgagaggacagcttgc

SEQ ID NO: 12915 - DNA, 20 bp, Artificial Sequence
  Description of Artificial Sequence: Synthetic oligonucleotide
  Target: APOC3; (+) strand; PAM type: YTN; PAM sequence: CTT
ctgagaggacagcttgctgc

SEQ ID NO: 12916 - DNA, 20 bp, Artificial Sequence
  Description of Artificial Sequence: Synthetic oligonucleotide
  Target: APOC3; (+) strand; PAM type: YTN; PAM sequence: TTC
tgagaggacagcttgctgcc

SEQ ID NO: 12917 - DNA, 20 bp, Artificial Sequence
  Description of Artificial Sequence: Synthetic oligonucleotide
  Target: APOC3; (+) strand; PAM type: YTN; PAM sequence: CTG
agaggacagcttgctgccag

SEQ ID NO: 12918 - DNA, 20 bp, Artificial Sequence
  Description of Artificial Sequence: Synthetic oligonucleotide
  Target: APOC3; (+) strand; PAM type: YTN; PAM sequence: CTT
gctgccagagctctattttt

SEQ ID NO: 12919 - DNA, 20 bp, Artificial Sequence
  Description of Artificial Sequence: Synthetic oligonucleotide
  Target: APOC3; (+) strand; PAM type: YTN; PAM sequence: TTG
ctgccagagctctatttttt

SEQ ID NO: 12920 - DNA, 20 bp, Artificial Sequence
  Description of Artificial Sequence: Synthetic oligonucleotide
  Target: APOC3; (+) strand; PAM type: YTN; PAM sequence: CTG
ccagagctctattttttatg

SEQ ID NO: 12921 - DNA, 20 bp, Artificial Sequence
  Description of Artificial Sequence: Synthetic oligonucleotide
  Target: APOC3; (+) strand; PAM type: YTN; PAM sequence: CTC
tattttttatgttagaggct

SEQ ID NO: 12922 - DNA, 20 bp, Artificial Sequence
  Description of Artificial Sequence: Synthetic oligonucleotide
  Target: APOC3; (+) strand; PAM type: YTN; PAM sequence: CTA
ttttttatgttagaggctcc

SEQ ID NO: 12923 - DNA, 20 bp, Artificial Sequence
  Description of Artificial Sequence: Synthetic oligonucleotide
  Target: APOC3; (+) strand; PAM type: YTN; PAM sequence: TTT
tttatgttagaggctccttc

SEQ ID NO: 12924 - DNA, 20 bp, Artificial Sequence
  Description of Artificial Sequence: Synthetic oligonucleotide
  Target: APOC3; (+) strand; PAM type: YTN; PAM sequence: TTT
ttatgttagaggctccttct

SEQ ID NO: 12925 - DNA, 20 bp, Artificial Sequence
  Description of Artificial Sequence: Synthetic oligonucleotide
  Target: APOC3; (+) strand; PAM type: YTN; PAM sequence: TTT
tatgttagaggctccttctg

SEQ ID NO: 12926 - DNA, 20 bp, Artificial Sequence
  Description of Artificial Sequence: Synthetic oligonucleotide
  Target: APOC3; (+) strand; PAM type: YTN; PAM sequence: TTT
atgttagaggctccttctgc

SEQ ID NO: 12927 - DNA, 20 bp, Artificial Sequence
  Description of Artificial Sequence: Synthetic oligonucleotide
  Target: APOC3; (+) strand; PAM type: YTN; PAM sequence: TTA
tgttagaggctccttctgcc

SEQ ID NO: 12928 - DNA, 20 bp, Artificial Sequence
  Description of Artificial Sequence: Synthetic oligonucleotide
  Target: APOC3; (+) strand; PAM type: YTN; PAM sequence: TTA
gaggctccttctgcctgcag

SEQ ID NO: 12929 - DNA, 20 bp, Artificial Sequence
  Description of Artificial Sequence: Synthetic oligonucleotide
  Target: APOC3; (+) strand; PAM type: YTN; PAM sequence: CTC
cttctgcctgcagactctgc

SEQ ID NO: 12930 - DNA, 20 bp, Artificial Sequence
  Description of Artificial Sequence: Synthetic oligonucleotide
  Target: APOC3; (+) strand; PAM type: YTN; PAM sequence: CTT
ctgcctgcagactctgctgt

SEQ ID NO: 12931 - DNA, 20 bp, Artificial Sequence
  Description of Artificial Sequence: Synthetic oligonucleotide
  Target: APOC3; (+) strand; PAM type: YTN; PAM sequence: TTC
tgcctgcagactctgctgtc

SEQ ID NO: 12932 - DNA, 20 bp, Artificial Sequence
  Description of Artificial Sequence: Synthetic oligonucleotide
  Target: APOC3; (+) strand; PAM type: YTN; PAM sequence: CTG
cctgcagactctgctgtctg

SEQ ID NO: 12933 - DNA, 20 bp, Artificial Sequence
  Description of Artificial Sequence: Synthetic oligonucleotide
  Target: APOC3; (+) strand; PAM type: YTN; PAM sequence: CTG
cagactctgctgtctgggaa

SEQ ID NO: 12934 - DNA, 20 bp, Artificial Sequence
  Description of Artificial Sequence: Synthetic oligonucleotide
  Target: APOC3; (+) strand; PAM type: YTN; PAM sequence: CTC
tgctgtctgggaagggcaca

SEQ ID NO: 12935 - DNA, 20 bp, Artificial Sequence
  Description of Artificial Sequence: Synthetic oligonucleotide
  Target: APOC3; (+) strand; PAM type: YTN; PAM sequence: CTG
ctgtctgggaagggcacagc

SEQ ID NO: 12936 - DNA, 20 bp, Artificial Sequence
  Description of Artificial Sequence: Synthetic oligonucleotide
  Target: APOC3; (+) strand; PAM type: YTN; PAM sequence: CTG
tctgggaagggcacagcgtt

SEQ ID NO: 12937 - DNA, 20 bp, Artificial Sequence
  Description of Artificial Sequence: Synthetic oligonucleotide
  Target: APOC3; (+) strand; PAM type: YTN; PAM sequence: CTG
ggaagggcacagcgttagga

SEQ ID NO: 12938 - DNA, 20 bp, Artificial Sequence
  Description of Artificial Sequence: Synthetic oligonucleotide
  Target: APOC3; (+) strand; PAM type: YTN; PAM sequence: TTA
ggagggagagggaggtgtga

SEQ ID NO: 12939 - DNA, 20 bp, Artificial Sequence
  Description of Artificial Sequence: Synthetic oligonucleotide
  Target: APOC3; (+) strand; PAM type: YTN; PAM sequence: CTC
catggacccgctgctttgta

SEQ ID NO: 12940 - DNA, 20 bp, Artificial Sequence
  Description of Artificial Sequence: Synthetic oligonucleotide
  Target: APOC3; (+) strand; PAM type: YTN; PAM sequence: CTG
ctttgtacttctctatctca

SEQ ID NO: 12941 - DNA, 20 bp, Artificial Sequence
  Description of Artificial Sequence: Synthetic oligonucleotide
  Target: APOC3; (+) strand; PAM type: YTN; PAM sequence: CTT
tgtacttctctatctcattt

SEQ ID NO: 12942 - DNA, 20 bp, Artificial Sequence
  Description of Artificial Sequence: Synthetic oligonucleotide
  Target: APOC3; (+) strand; PAM type: YTN; PAM sequence: TTT
gtacttctctatctcatttc

SEQ ID NO: 12943 - DNA, 20 bp, Artificial Sequence
  Description of Artificial Sequence: Synthetic oligonucleotide
  Target: APOC3; (+) strand; PAM type: YTN; PAM sequence: TTG
tacttctctatctcatttcc

SEQ ID NO: 12944 - DNA, 20 bp, Artificial Sequence
  Description of Artificial Sequence: Synthetic oligonucleotide
  Target: APOC3; (+) strand; PAM type: YTN; PAM sequence: CTT
ctctatctcatttccttttc

SEQ ID NO: 12945 - DNA, 20 bp, Artificial Sequence
  Description of Artificial Sequence: Synthetic oligonucleotide
  Target: APOC3; (+) strand; PAM type: YTN; PAM sequence: TTC
tctatctcatttccttttca

SEQ ID NO: 12946 - DNA, 20 bp, Artificial Sequence
  Description of Artificial Sequence: Synthetic oligonucleotide
  Target: APOC3; (+) strand; PAM type: YTN; PAM sequence: CTC
tatctcatttccttttcagc

SEQ ID NO: 12947 - DNA, 20 bp, Artificial Sequence
  Description of Artificial Sequence: Synthetic oligonucleotide
  Target: APOC3; (+) strand; PAM type: YTN; PAM sequence: CTA
tctcatttccttttcagcac

SEQ ID NO: 12948 - DNA, 20 bp, Artificial Sequence
  Description of Artificial Sequence: Synthetic oligonucleotide
  Target: APOC3; (+) strand; PAM type: YTN; PAM sequence: CTC
atttccttttcagcaccact

SEQ ID NO: 12949 - DNA, 20 bp, Artificial Sequence
  Description of Artificial Sequence: Synthetic oligonucleotide
  Target: APOC3; (+) strand; PAM type: YTN; PAM sequence: TTT
ccttttcagcaccactctgg

SEQ ID NO: 12950 - DNA, 20 bp, Artificial Sequence
  Description of Artificial Sequence: Synthetic oligonucleotide
  Target: APOC3; (+) strand; PAM type: YTN; PAM sequence: TTC
cttttcagcaccactctggg

SEQ ID NO: 12951 - DNA, 20 bp, Artificial Sequence
  Description of Artificial Sequence: Synthetic oligonucleotide
  Target: APOC3; (+) strand; PAM type: YTN; PAM sequence: CTT
ttcagcaccactctgggcaa

SEQ ID NO: 12952 - DNA, 20 bp, Artificial Sequence
  Description of Artificial Sequence: Synthetic oligonucleotide
  Target: APOC3; (+) strand; PAM type: YTN; PAM sequence: TTT
tcagcaccactctgggcaat

SEQ ID NO: 12953 - DNA, 20 bp, Artificial Sequence
  Description of Artificial Sequence: Synthetic oligonucleotide
  Target: APOC3; (+) strand; PAM type: YTN; PAM sequence: TTT
cagcaccactctgggcaatc

SEQ ID NO: 12954 - DNA, 20 bp, Artificial Sequence
  Description of Artificial Sequence: Synthetic oligonucleotide
  Target: APOC3; (+) strand; PAM type: YTN; PAM sequence: TTC
agcaccactctgggcaatca

SEQ ID NO: 12955 - DNA, 20 bp, Artificial Sequence
  Description of Artificial Sequence: Synthetic oligonucleotide
  Target: APOC3; (+) strand; PAM type: YTN; PAM sequence: CTC
tgggcaatcagtattccagc

SEQ ID NO: 12956 - DNA, 20 bp, Artificial Sequence
  Description of Artificial Sequence: Synthetic oligonucleotide
  Target: APOC3; (+) strand; PAM type: YTN; PAM sequence: CTG
ggcaatcagtattccagccc

SEQ ID NO: 12957 - DNA, 20 bp, Artificial Sequence
  Description of Artificial Sequence: Synthetic oligonucleotide
  Target: APOC3; (+) strand; PAM type: YTN; PAM sequence: TTC
cagccccattttatcctcag

SEQ ID NO: 12958 - DNA, 20 bp, Artificial Sequence
  Description of Artificial Sequence: Synthetic oligonucleotide
  Target: APOC3; (+) strand; PAM type: YTN; PAM sequence: TTT
tatcctcagaaaattgaggc

SEQ ID NO: 12959 - DNA, 20 bp, Artificial Sequence
  Description of Artificial Sequence: Synthetic oligonucleotide
  Target: APOC3; (+) strand; PAM type: YTN; PAM sequence: TTT
atcctcagaaaattgaggct

SEQ ID NO: 12960 - DNA, 20 bp, Artificial Sequence
  Description of Artificial Sequence: Synthetic oligonucleotide
  Target: APOC3; (+) strand; PAM type: YTN; PAM sequence: TTA
tcctcagaaaattgaggctc

SEQ ID NO: 12961 - DNA, 20 bp, Artificial Sequence
  Description of Artificial Sequence: Synthetic oligonucleotide
  Target: APOC3; (+) strand; PAM type: YTN; PAM sequence: CTC
agaaaattgaggctctgaga

SEQ ID NO: 12962 - DNA, 20 bp, Artificial Sequence
  Description of Artificial Sequence: Synthetic oligonucleotide
  Target: APOC3; (+) strand; PAM type: YTN; PAM sequence: TTG
aggctctgagatgttatctc

SEQ ID NO: 12963 - DNA, 20 bp, Artificial Sequence
  Description of Artificial Sequence: Synthetic oligonucleotide
  Target: APOC3; (+) strand; PAM type: YTN; PAM sequence: CTC
tgagatgttatctctgtgac

SEQ ID NO: 12964 - DNA, 20 bp, Artificial Sequence
  Description of Artificial Sequence: Synthetic oligonucleotide
  Target: APOC3; (+) strand; PAM type: YTN; PAM sequence: CTG
agatgttatctctgtgacct

SEQ ID NO: 12965 - DNA, 20 bp, Artificial Sequence
  Description of Artificial Sequence: Synthetic oligonucleotide
  Target: APOC3; (+) strand; PAM type: YTN; PAM sequence: TTA
tctctgtgacctgggtccta

SEQ ID NO: 12966 - DNA, 20 bp, Artificial Sequence
  Description of Artificial Sequence: Synthetic oligonucleotide
  Target: APOC3; (+) strand; PAM type: YTN; PAM sequence: CTC
tgtgacctgggtcctattac

SEQ ID NO: 12967 - DNA, 20 bp, Artificial Sequence
  Description of Artificial Sequence: Synthetic oligonucleotide
  Target: APOC3; (+) strand; PAM type: YTN; PAM sequence: CTG
tgacctgggtcctattacgt

SEQ ID NO: 12968 - DNA, 20 bp, Artificial Sequence
  Description of Artificial Sequence: Synthetic oligonucleotide
  Target: APOC3; (+) strand; PAM type: YTN; PAM sequence: CTG
ggtcctattacgtgccaaag

SEQ ID NO: 12969 - DNA, 20 bp, Artificial Sequence
  Description of Artificial Sequence: Synthetic oligonucleotide
  Target: APOC3; (+) strand; PAM type: YTN; PAM sequence: CTA
ttacgtgccaaaggcatcat

SEQ ID NO: 12970 - DNA, 20 bp, Artificial Sequence
  Description of Artificial Sequence: Synthetic oligonucleotide
  Target: APOC3; (+) strand; PAM type: YTN; PAM sequence: TTA
cgtgccaaaggcatcattta

SEQ ID NO: 12971 - DNA, 20 bp, Artificial Sequence
  Description of Artificial Sequence: Synthetic oligonucleotide
  Target: APOC3; (+) strand; PAM type: YTN; PAM sequence: TTT
aagcctaagatgtcctggct

SEQ ID NO: 12972 - DNA, 20 bp, Artificial Sequence
  Description of Artificial Sequence: Synthetic oligonucleotide
  Target: APOC3; (+) strand; PAM type: YTN; PAM sequence: TTA
agcctaagatgtcctggctc

SEQ ID NO: 12973 - DNA, 20 bp, Artificial Sequence
  Description of Artificial Sequence: Synthetic oligonucleotide
  Target: APOC3; (+) strand; PAM type: YTN; PAM sequence: CTA
agatgtcctggctccaaggt

SEQ ID NO: 12974 - DNA, 20 bp, Artificial Sequence
  Description of Artificial Sequence: Synthetic oligonucleotide
  Target: APOC3; (+) strand; PAM type: YTN; PAM sequence: CTG
gctccaaggtgtcagcatct

SEQ ID NO: 12975 - DNA, 20 bp, Artificial Sequence
  Description of Artificial Sequence: Synthetic oligonucleotide
  Target: APOC3; (+) strand; PAM type: YTN; PAM sequence: CTC
caaggtgtcagcatctggaa

SEQ ID NO: 12976 - DNA, 20 bp, Artificial Sequence
  Description of Artificial Sequence: Synthetic oligonucleotide
  Target: APOC3; (+) strand; PAM type: YTN; PAM sequence: CTG
gaagacaggcgccctcatcc

SEQ ID NO: 12977 - DNA, 20 bp, Artificial Sequence
  Description of Artificial Sequence: Synthetic oligonucleotide
  Target: APOC3; (+) strand; PAM type: YTN; PAM sequence: CTC
atcctgccatccctgctgcg

SEQ ID NO: 12978 - DNA, 20 bp, Artificial Sequence
  Description of Artificial Sequence: Synthetic oligonucleotide
  Target: APOC3; (+) strand; PAM type: YTN; PAM sequence: CTG
ccatccctgctgcggcttca

SEQ ID NO: 12979 - DNA, 20 bp, Artificial Sequence
  Description of Artificial Sequence: Synthetic oligonucleotide
  Target: APOC3; (+) strand; PAM type: YTN; PAM sequence: CTG
ctgcggcttcactgtgggcc

SEQ ID NO: 12980 - DNA, 20 bp, Artificial Sequence
  Description of Artificial Sequence: Synthetic oligonucleotide
  Target: APOC3; (+) strand; PAM type: YTN; PAM sequence: CTG
cggcttcactgtgggcccag

SEQ ID NO: 12981 - DNA, 20 bp, Artificial Sequence
  Description of Artificial Sequence: Synthetic oligonucleotide
  Target: APOC3; (+) strand; PAM type: YTN; PAM sequence: CTT
cactgtgggcccaggggaca

SEQ ID NO: 12982 - DNA, 20 bp, Artificial Sequence
  Description of Artificial Sequence: Synthetic oligonucleotide
  Target: APOC3; (+) strand; PAM type: YTN; PAM sequence: TTC
actgtgggcccaggggacat

SEQ ID NO: 12983 - DNA, 20 bp, Artificial Sequence
  Description of Artificial Sequence: Synthetic oligonucleotide
  Target: APOC3; (+) strand; PAM type: YTN; PAM sequence: CTG
tgggcccaggggacatctca

SEQ ID NO: 12984 - DNA, 20 bp, Artificial Sequence
  Description of Artificial Sequence: Synthetic oligonucleotide
  Target: APOC3; (+) strand; PAM type: YTN; PAM sequence: CTC
agccccgagaagggtcagcg

SEQ ID NO: 12985 - DNA, 20 bp, Artificial Sequence
  Description of Artificial Sequence: Synthetic oligonucleotide
  Target: APOC3; (+) strand; PAM type: YTN; PAM sequence: CTC
ctggaccaccgactccccgc

SEQ ID NO: 12986 - DNA, 20 bp, Artificial Sequence
  Description of Artificial Sequence: Synthetic oligonucleotide
  Target: APOC3; (+) strand; PAM type: YTN; PAM sequence: CTG
gaccaccgactccccgcaga

SEQ ID NO: 12987 - DNA, 20 bp, Artificial Sequence
  Description of Artificial Sequence: Synthetic oligonucleotide
  Target: APOC3; (+) strand; PAM type: YTN; PAM sequence: CTC
cccgcagaactcctctgtgc

SEQ ID NO: 12988 - DNA, 20 bp, Artificial Sequence
  Description of Artificial Sequence: Synthetic oligonucleotide
  Target: APOC3; (+) strand; PAM type: YTN; PAM sequence: CTC
ctctgtgccctctcctcacc

SEQ ID NO: 12989 - DNA, 20 bp, Artificial Sequence
  Description of Artificial Sequence: Synthetic oligonucleotide
  Target: APOC3; (+) strand; PAM type: YTN; PAM sequence: CTC
tgtgccctctcctcaccaga

SEQ ID NO: 12990 - DNA, 20 bp, Artificial Sequence
  Description of Artificial Sequence: Synthetic oligonucleotide
  Target: APOC3; (+) strand; PAM type: YTN; PAM sequence: CTG
tgccctctcctcaccagacc

SEQ ID NO: 12991 - DNA, 20 bp, Artificial Sequence
  Description of Artificial Sequence: Synthetic oligonucleotide
  Target: APOC3; (+) strand; PAM type: YTN; PAM sequence: CTC
tcctcaccagaccttgttcc

SEQ ID NO: 12992 - DNA, 20 bp, Artificial Sequence
  Description of Artificial Sequence: Synthetic oligonucleotide
  Target: APOC3; (+) strand; PAM type: YTN; PAM sequence: CTC
ctcaccagaccttgttcctc

SEQ ID NO: 12993 - DNA, 20 bp, Artificial Sequence
  Description of Artificial Sequence: Synthetic oligonucleotide
  Target: APOC3; (+) strand; PAM type: YTN; PAM sequence: CTC
accagaccttgttcctccca

SEQ ID NO: 12994 - DNA, 20 bp, Artificial Sequence
  Description of Artificial Sequence: Synthetic oligonucleotide
  Target: APOC3; (+) strand; PAM type: YTN; PAM sequence: CTT
gttcctcccagttgctccca

SEQ ID NO: 12995 - DNA, 20 bp, Artificial Sequence
  Description of Artificial Sequence: Synthetic oligonucleotide
  Target: APOC3; (+) strand; PAM type: YTN; PAM sequence: TTG
ttcctcccagttgctcccac

SEQ ID NO: 12996 - DNA, 20 bp, Artificial Sequence
  Description of Artificial Sequence: Synthetic oligonucleotide
  Target: APOC3; (+) strand; PAM type: YTN; PAM sequence: TTC
ctcccagttgctcccacagc

SEQ ID NO: 12997 - DNA, 20 bp, Artificial Sequence
  Description of Artificial Sequence: Synthetic oligonucleotide
  Target: APOC3; (+) strand; PAM type: YTN; PAM sequence: CTC
ccagttgctcccacagccag

SEQ ID NO: 12998 - DNA, 20 bp, Artificial Sequence
  Description of Artificial Sequence: Synthetic oligonucleotide
  Target: APOC3; (+) strand; PAM type: YTN; PAM sequence: TTG
ctcccacagccagggggcag

SEQ ID NO: 12999 - DNA, 20 bp, Artificial Sequence
  Description of Artificial Sequence: Synthetic oligonucleotide
  Target: APOC3; (+) strand; PAM type: YTN; PAM sequence: CTC
ccacagccagggggcagtga

SEQ ID NO: 13000 - DNA, 20 bp, Artificial Sequence
  Description of Artificial Sequence: Synthetic oligonucleotide
  Target: APOC3; (+) strand; PAM type: YTN; PAM sequence: CTG
ctcttcccccagccccactg

SEQ ID NO: 13001 - DNA, 20 bp, Artificial Sequence
  Description of Artificial Sequence: Synthetic oligonucleotide
  Target: APOC3; (+) strand; PAM type: YTN; PAM sequence: CTC
ttcccccagccccactgagg

SEQ ID NO: 13002 - DNA, 20 bp, Artificial Sequence
  Description of Artificial Sequence: Synthetic oligonucleotide
  Target: APOC3; (+) strand; PAM type: YTN; PAM sequence: CTT
cccccagccccactgaggaa

SEQ ID NO: 13003 - DNA, 20 bp, Artificial Sequence
  Description of Artificial Sequence: Synthetic oligonucleotide
  Target: APOC3; (+) strand; PAM type: YTN; PAM sequence: TTC
ccccagccccactgaggaac

SEQ ID NO: 13004 - DNA, 20 bp, Artificial Sequence
  Description of Artificial Sequence: Synthetic oligonucleotide
  Target: APOC3; (+) strand; PAM type: YTN; PAM sequence: CTG
aggaacccaggaaggtgaac

SEQ ID NO: 13005 - DNA, 20 bp, Artificial Sequence
  Description of Artificial Sequence: Synthetic oligonucleotide
  Target: APOC3; (+) strand; PAM type: YTN; PAM sequence: CTG
gtgggggctggggagggccc

SEQ ID NO: 13006 - DNA, 20 bp, Artificial Sequence
  Description of Artificial Sequence: Synthetic oligonucleotide
  Target: APOC3; (+) strand; PAM type: YTN; PAM sequence: CTG
gggagggccccagacatgag

SEQ ID NO: 13007 - DNA, 20 bp, Artificial Sequence
  Description of Artificial Sequence: Synthetic oligonucleotide
  Target: APOC3; (+) strand; PAM type: YTN; PAM sequence: CTC
ctcccccaggggatgttatc

SEQ ID NO: 13008 - DNA, 20 bp, Artificial Sequence
  Description of Artificial Sequence: Synthetic oligonucleotide
  Target: APOC3; (+) strand; PAM type: YTN; PAM sequence: CTC
ccccaggggatgttatcagt

SEQ ID NO: 13009 - DNA, 20 bp, Artificial Sequence
  Description of Artificial Sequence: Synthetic oligonucleotide
  Target: APOC3; (+) strand; PAM type: YTN; PAM sequence: TTA
tcagtgggtccagagggcaa

SEQ ID NO: 13010 - DNA, 20 bp, Artificial Sequence
  Description of Artificial Sequence: Synthetic oligonucleotide
  Target: APOC3; (+) strand; PAM type: YTN; PAM sequence: CTG
gtggagggaggggcaaaggc

SEQ ID NO: 13011 - DNA, 20 bp, Artificial Sequence
  Description of Artificial Sequence: Synthetic oligonucleotide
  Target: APOC3; (+) strand; PAM type: YTN; PAM sequence: CTC
gggctctgagcggccttggc

SEQ ID NO: 13012 - DNA, 20 bp, Artificial Sequence
  Description of Artificial Sequence: Synthetic oligonucleotide
  Target: APOC3; (+) strand; PAM type: YTN; PAM sequence: CTC
tgagcggccttggcccttct

SEQ ID NO: 13013 - DNA, 20 bp, Artificial Sequence
  Description of Artificial Sequence: Synthetic oligonucleotide
  Target: APOC3; (+) strand; PAM type: YTN; PAM sequence: CTG
agcggccttggcccttctcc

SEQ ID NO: 13014 - DNA, 20 bp, Artificial Sequence
  Description of Artificial Sequence: Synthetic oligonucleotide
  Target: APOC3; (+) strand; PAM type: YTN; PAM sequence: CTT
ggcccttctccaccaacccc

SEQ ID NO: 13015 - DNA, 20 bp, Artificial Sequence
  Description of Artificial Sequence: Synthetic oligonucleotide
  Target: APOC3; (+) strand; PAM type: YTN; PAM sequence: TTG
gcccttctccaccaacccct

SEQ ID NO: 13016 - DNA, 20 bp, Artificial Sequence
  Description of Artificial Sequence: Synthetic oligonucleotide
  Target: APOC3; (+) strand; PAM type: YTN; PAM sequence: CTT
ctccaccaacccctgcccta

SEQ ID NO: 13017 - DNA, 20 bp, Artificial Sequence
  Description of Artificial Sequence: Synthetic oligonucleotide
  Target: APOC3; (+) strand; PAM type: YTN; PAM sequence: TTC
tccaccaacccctgccctac

SEQ ID NO: 13018 - DNA, 20 bp, Artificial Sequence
  Description of Artificial Sequence: Synthetic oligonucleotide
  Target: APOC3; (+) strand; PAM type: YTN; PAM sequence: CTC
caccaacccctgccctacac

SEQ ID NO: 13019 - DNA, 20 bp, Artificial Sequence
  Description of Artificial Sequence: Synthetic oligonucleotide
  Target: APOC3; (+) strand; PAM type: YTN; PAM sequence: CTG
ccctacactaagggggaggc

SEQ ID NO: 13020 - DNA, 20 bp, Artificial Sequence
  Description of Artificial Sequence: Synthetic oligonucleotide
  Target: APOC3; (+) strand; PAM type: YTN; PAM sequence: CTA
cactaagggggaggcagcgg

SEQ ID NO: 13021 - DNA, 20 bp, Artificial Sequence
  Description of Artificial Sequence: Synthetic oligonucleotide
  Target: APOC3; (+) strand; PAM type: YTN; PAM sequence: CTA
agggggaggcagcggggggc

SEQ ID NO: 13022 - DNA, 20 bp, Artificial Sequence
  Description of Artificial Sequence: Synthetic oligonucleotide
  Target: APOC3; (+) strand; PAM type: YTN; PAM sequence: CTG
ctgggtgagcagcactcgcc

SEQ ID NO: 13023 - DNA, 20 bp, Artificial Sequence
  Description of Artificial Sequence: Synthetic oligonucleotide
  Target: APOC3; (+) strand; PAM type: YTN; PAM sequence: CTG
ggtgagcagcactcgcctgc

SEQ ID NO: 13024 - DNA, 20 bp, Artificial Sequence
  Description of Artificial Sequence: Synthetic oligonucleotide
  Target: APOC3; (+) strand; PAM type: YTN; PAM sequence: CTC
gcctgcctggattgaaaccc

SEQ ID NO: 13025 - DNA, 20 bp, Artificial Sequence
  Description of Artificial Sequence: Synthetic oligonucleotide
  Target: APOC3; (+) strand; PAM type: YTN; PAM sequence: CTG
cctggattgaaacccagaga

SEQ ID NO: 13026 - DNA, 20 bp, Artificial Sequence
  Description of Artificial Sequence: Synthetic oligonucleotide
  Target: APOC3; (+) strand; PAM type: YTN; PAM sequence: CTG
gattgaaacccagagatgga

SEQ ID NO: 13027 - DNA, 20 bp, Artificial Sequence
  Description of Artificial Sequence: Synthetic oligonucleotide
  Target: APOC3; (+) strand; PAM type: YTN; PAM sequence: TTG
aaacccagagatggaggtgc

SEQ ID NO: 13028 - DNA, 20 bp, Artificial Sequence
  Description of Artificial Sequence: Synthetic oligonucleotide
  Target: APOC3; (+) strand; PAM type: YTN; PAM sequence: CTG
ggaggggctgtgagagctca

SEQ ID NO: 13029 - DNA, 20 bp, Artificial Sequence
  Description of Artificial Sequence: Synthetic oligonucleotide
  Target: APOC3; (+) strand; PAM type: YTN; PAM sequence: CTG
tgagagctcagccctgtaac

SEQ ID NO: 13030 - DNA, 20 bp, Artificial Sequence
  Description of Artificial Sequence: Synthetic oligonucleotide
  Target: APOC3; (+) strand; PAM type: YTN; PAM sequence: CTC
agccctgtaaccaggccttg

SEQ ID NO: 13031 - DNA, 20 bp, Artificial Sequence
  Description of Artificial Sequence: Synthetic oligonucleotide
  Target: APOC3; (+) strand; PAM type: YTN; PAM sequence: CTG
taaccaggccttgccggagc

SEQ ID NO: 13032 - DNA, 20 bp, Artificial Sequence
  Description of Artificial Sequence: Synthetic oligonucleotide
  Target: APOC3; (+) strand; PAM type: YTN; PAM sequence: CTT
gccggagccactgatgcctg

SEQ ID NO: 13033 - DNA, 20 bp, Artificial Sequence
  Description of Artificial Sequence: Synthetic oligonucleotide
  Target: APOC3; (+) strand; PAM type: YTN; PAM sequence: TTG
ccggagccactgatgcctgg

SEQ ID NO: 13034 - DNA, 20 bp, Artificial Sequence
  Description of Artificial Sequence: Synthetic oligonucleotide
  Target: APOC3; (+) strand; PAM type: YTN; PAM sequence: CTG
atgcctggtcttctgtgcct

SEQ ID NO: 13035 - DNA, 20 bp, Artificial Sequence
  Description of Artificial Sequence: Synthetic oligonucleotide
  Target: APOC3; (+) strand; PAM type: YTN; PAM sequence: CTG
gtcttctgtgcctttactcc

SEQ ID NO: 13036 - DNA, 20 bp, Artificial Sequence
  Description of Artificial Sequence: Synthetic oligonucleotide
  Target: APOC3; (+) strand; PAM type: YTN; PAM sequence: CTT
ctgtgcctttactccaaaca

SEQ ID NO: 13037 - DNA, 20 bp, Artificial Sequence
  Description of Artificial Sequence: Synthetic oligonucleotide
  Target: APOC3; (+) strand; PAM type: YTN; PAM sequence: TTC
tgtgcctttactccaaacac

SEQ ID NO: 13038 - DNA, 20 bp, Artificial Sequence
  Description of Artificial Sequence: Synthetic oligonucleotide
  Target: APOC3; (+) strand; PAM type: YTN; PAM sequence: CTG
tgcctttactccaaacaccc

SEQ ID NO: 13039 - DNA, 20 bp, Artificial Sequence
  Description of Artificial Sequence: Synthetic oligonucleotide
  Target: APOC3; (+) strand; PAM type: YTN; PAM sequence: CTT
tactccaaacaccccccagc

SEQ ID NO: 13040 - DNA, 20 bp, Artificial Sequence
  Description of Artificial Sequence: Synthetic oligonucleotide
  Target: APOC3; (+) strand; PAM type: YTN; PAM sequence: TTT
actccaaacaccccccagcc

SEQ ID NO: 13041 - DNA, 20 bp, Artificial Sequence
  Description of Artificial Sequence: Synthetic oligonucleotide
  Target: APOC3; (+) strand; PAM type: YTN; PAM sequence: TTA
ctccaaacaccccccagccc

SEQ ID NO: 13042 - DNA, 20 bp, Artificial Sequence
  Description of Artificial Sequence: Synthetic oligonucleotide
  Target: APOC3; (+) strand; PAM type: YTN; PAM sequence: CTC
caaacaccccccagcccaag

SEQ ID NO: 13043 - DNA, 20 bp, Artificial Sequence
  Description of Artificial Sequence: Synthetic oligonucleotide
  Target: APOC3; (+) strand; PAM type: YTN; PAM sequence: CTT
gttctcaagtctgaagaagc

SEQ ID NO: 13044 - DNA, 20 bp, Artificial Sequence
  Description of Artificial Sequence: Synthetic oligonucleotide
  Target: APOC3; (+) strand; PAM type: YTN; PAM sequence: TTG
ttctcaagtctgaagaagcc

SEQ ID NO: 13045 - DNA, 20 bp, Artificial Sequence
  Description of Artificial Sequence: Synthetic oligonucleotide
  Target: APOC3; (+) strand; PAM type: YTN; PAM sequence: TTC
tcaagtctgaagaagcccct

SEQ ID NO: 13046 - DNA, 20 bp, Artificial Sequence
  Description of Artificial Sequence: Synthetic oligonucleotide
  Target: APOC3; (+) strand; PAM type: YTN; PAM sequence: CTC
aagtctgaagaagcccctca

SEQ ID NO: 13047 - DNA, 20 bp, Artificial Sequence
  Description of Artificial Sequence: Synthetic oligonucleotide
  Target: APOC3; (+) strand; PAM type: YTN; PAM sequence: CTG
aagaagcccctcacccctct

SEQ ID NO: 13048 - DNA, 20 bp, Artificial Sequence
  Description of Artificial Sequence: Synthetic oligonucleotide
  Target: APOC3; (+) strand; PAM type: YTN; PAM sequence: CTC
acccctctactccaggctgt

SEQ ID NO: 13049 - DNA, 20 bp, Artificial Sequence
  Description of Artificial Sequence: Synthetic oligonucleotide
  Target: APOC3; (+) strand; PAM type: YTN; PAM sequence: CTC
tactccaggctgtgttcagg

SEQ ID NO: 13050 - DNA, 20 bp, Artificial Sequence
  Description of Artificial Sequence: Synthetic oligonucleotide
  Target: APOC3; (+) strand; PAM type: YTN; PAM sequence: CTA
ctccaggctgtgttcagggc

SEQ ID NO: 13051 - DNA, 20 bp, Artificial Sequence
  Description of Artificial Sequence: Synthetic oligonucleotide
  Target: APOC3; (+) strand; PAM type: YTN; PAM sequence: CTC
caggctgtgttcagggcttg

SEQ ID NO: 13052 - DNA, 20 bp, Artificial Sequence
  Description of Artificial Sequence: Synthetic oligonucleotide
  Target: APOC3; (+) strand; PAM type: YTN; PAM sequence: CTG
tgttcagggcttggggctgg

SEQ ID NO: 13053 - DNA, 20 bp, Artificial Sequence
  Description of Artificial Sequence: Synthetic oligonucleotide
  Target: APOC3; (+) strand; PAM type: YTN; PAM sequence: TTC
agggcttggggctggtggag

SEQ ID NO: 13054 - DNA, 20 bp, Artificial Sequence
  Description of Artificial Sequence: Synthetic oligonucleotide
  Target: APOC3; (+) strand; PAM type: YTN; PAM sequence: CTT
ggggctggtggagggagggg

SEQ ID NO: 13055 - DNA, 20 bp, Artificial Sequence
  Description of Artificial Sequence: Synthetic oligonucleotide
  Target: APOC3; (+) strand; PAM type: YTN; PAM sequence: TTG
gggctggtggagggaggggc

SEQ ID NO: 13056 - DNA, 20 bp, Artificial Sequence
  Description of Artificial Sequence: Synthetic oligonucleotide
  Target: APOC3; (+) strand; PAM type: YTN; PAM sequence: CTG
gtggagggaggggcctgaaa

SEQ ID NO: 13057 - DNA, 20 bp, Artificial Sequence
  Description of Artificial Sequence: Synthetic oligonucleotide
  Target: APOC3; (+) strand; PAM type: YTN; PAM sequence: CTG
aaattccagtgtgaaaggct

SEQ ID NO: 13058 - DNA, 20 bp, Artificial Sequence
  Description of Artificial Sequence: Synthetic oligonucleotide
  Target: APOC3; (+) strand; PAM type: YTN; PAM sequence: TTC
cagtgtgaaaggctgagatg

SEQ ID NO: 13059 - DNA, 20 bp, Artificial Sequence
  Description of Artificial Sequence: Synthetic oligonucleotide
  Target: APOC3; (+) strand; PAM type: YTN; PAM sequence: CTG
agatgggcccgaggcccctg

SEQ ID NO: 13060 - DNA, 20 bp, Artificial Sequence
  Description of Artificial Sequence: Synthetic oligonucleotide
  Target: APOC3; (+) strand; PAM type: YTN; PAM sequence: CTG
gcctatgtccaagccatttc

SEQ ID NO: 13061 - DNA, 20 bp, Artificial Sequence
  Description of Artificial Sequence: Synthetic oligonucleotide
  Target: APOC3; (+) strand; PAM type: YTN; PAM sequence: CTA
tgtccaagccatttcccctc

SEQ ID NO: 13062 - DNA, 20 bp, Artificial Sequence
  Description of Artificial Sequence: Synthetic oligonucleotide
  Target: APOC3; (+) strand; PAM type: YTN; PAM sequence: TTT
cccctctcaccagcctctcc

SEQ ID NO: 13063 - DNA, 20 bp, Artificial Sequence
  Description of Artificial Sequence: Synthetic oligonucleotide
  Target: APOC3; (+) strand; PAM type: YTN; PAM sequence: TTC
ccctctcaccagcctctccc

SEQ ID NO: 13064 - DNA, 20 bp, Artificial Sequence
  Description of Artificial Sequence: Synthetic oligonucleotide
  Target: APOC3; (+) strand; PAM type: YTN; PAM sequence: CTC
tcaccagcctctccctgggg

SEQ ID NO: 13065 - DNA, 20 bp, Artificial Sequence
  Description of Artificial Sequence: Synthetic oligonucleotide
  Target: APOC3; (+) strand; PAM type: YTN; PAM sequence: CTC
accagcctctccctggggag

SEQ ID NO: 13066 - DNA, 20 bp, Artificial Sequence
  Description of Artificial Sequence: Synthetic oligonucleotide
  Target: APOC3; (+) strand; PAM type: YTN; PAM sequence: CTC
tccctggggagccagtcagc

SEQ ID NO: 13067 - DNA, 20 bp, Artificial Sequence
  Description of Artificial Sequence: Synthetic oligonucleotide
  Target: APOC3; (+) strand; PAM type: YTN; PAM sequence: CTC
cctggggagccagtcagcta

SEQ ID NO: 13068 - DNA, 20 bp, Artificial Sequence
  Description of Artificial Sequence: Synthetic oligonucleotide
  Target: APOC3; (+) strand; PAM type: YTN; PAM sequence: CTG
gggagccagtcagctaggaa

SEQ ID NO: 13069 - DNA, 20 bp, Artificial Sequence
  Description of Artificial Sequence: Synthetic oligonucleotide
  Target: APOC3; (+) strand; PAM type: YTN; PAM sequence: CTA
ggaaggaatgagggctcccc

SEQ ID NO: 13070 - DNA, 20 bp, Artificial Sequence
  Description of Artificial Sequence: Synthetic oligonucleotide
  Target: APOC3; (+) strand; PAM type: YTN; PAM sequence: CTC
cccaggcccacccccagttc

SEQ ID NO: 13071 - DNA, 20 bp, Artificial Sequence
  Description of Artificial Sequence: Synthetic oligonucleotide
  Target: APOC3; (+) strand; PAM type: YTN; PAM sequence: TTC
ctgagctcatctgggctgca

SEQ ID NO: 13072 - DNA, 20 bp, Artificial Sequence
  Description of Artificial Sequence: Synthetic oligonucleotide
  Target: APOC3; (+) strand; PAM type: YTN; PAM sequence: CTG
agctcatctgggctgcaggg

SEQ ID NO: 13073 - DNA, 20 bp, Artificial Sequence
  Description of Artificial Sequence: Synthetic oligonucleotide
  Target: APOC3; (+) strand; PAM type: YTN; PAM sequence: CTC
atctgggctgcagggctggc

SEQ ID NO: 13074 - DNA, 20 bp, Artificial Sequence
  Description of Artificial Sequence: Synthetic oligonucleotide
  Target: APOC3; (+) strand; PAM type: YTN; PAM sequence: CTG
ggctgcagggctggcgggac

SEQ ID NO: 13075 - DNA, 20 bp, Artificial Sequence
  Description of Artificial Sequence: Synthetic oligonucleotide
  Target: APOC3; (+) strand; PAM type: YTN; PAM sequence: CTG
cagggctggcgggacagcag

SEQ ID NO: 13076 - DNA, 20 bp, Artificial Sequence
  Description of Artificial Sequence: Synthetic oligonucleotide
  Target: APOC3; (+) strand; PAM type: YTN; PAM sequence: CTG
gcgggacagcagcgtggact

SEQ ID NO: 13077 - DNA, 20 bp, Artificial Sequence
  Description of Artificial Sequence: Synthetic oligonucleotide
  Target: APOC3; (+) strand; PAM type: YTN; PAM sequence: CTC
agtctcctagggatttccca

SEQ ID NO: 13078 - DNA, 20 bp, Artificial Sequence
  Description of Artificial Sequence: Synthetic oligonucleotide
  Target: APOC3; (+) strand; PAM type: YTN; PAM sequence: CTC
ctagggatttcccaactctc

SEQ ID NO: 13079 - DNA, 20 bp, Artificial Sequence
  Description of Artificial Sequence: Synthetic oligonucleotide
  Target: APOC3; (+) strand; PAM type: YTN; PAM sequence: CTA
gggatttcccaactctcccg

SEQ ID NO: 13080 - DNA, 20 bp, Artificial Sequence
  Description of Artificial Sequence: Synthetic oligonucleotide
  Target: APOC3; (+) strand; PAM type: YTN; PAM sequence: TTT
cccaactctcccgcccgctt

SEQ ID NO: 13081 - DNA, 20 bp, Artificial Sequence
  Description of Artificial Sequence: Synthetic oligonucleotide
  Target: APOC3; (+) strand; PAM type: YTN; PAM sequence: TTC
ccaactctcccgcccgcttg

SEQ ID NO: 13082 - DNA, 20 bp, Artificial Sequence
  Description of Artificial Sequence: Synthetic oligonucleotide
  Target: APOC3; (+) strand; PAM type: YTN; PAM sequence: CTC
tcccgcccgcttgctgcatc

SEQ ID NO: 13083 - DNA, 20 bp, Artificial Sequence
  Description of Artificial Sequence: Synthetic oligonucleotide
  Target: APOC3; (+) strand; PAM type: YTN; PAM sequence: CTC
ccgcccgcttgctgcatctg

SEQ ID NO: 13084 - DNA, 20 bp, Artificial Sequence
  Description of Artificial Sequence: Synthetic oligonucleotide
  Target: APOC3; (+) strand; PAM type: YTN; PAM sequence: CTT
gctgcatctggacaccctgc

SEQ ID NO: 13085 - DNA, 20 bp, Artificial Sequence
  Description of Artificial Sequence: Synthetic oligonucleotide
  Target: APOC3; (+) strand; PAM type: YTN; PAM sequence: TTG
ctgcatctggacaccctgcc

SEQ ID NO: 13086 - DNA, 20 bp, Artificial Sequence
  Description of Artificial Sequence: Synthetic oligonucleotide
  Target: APOC3; (+) strand; PAM type: YTN; PAM sequence: CTG
catctggacaccctgcctca

SEQ ID NO: 13087 - DNA, 20 bp, Artificial Sequence
  Description of Artificial Sequence: Synthetic oligonucleotide
  Target: APOC3; (+) strand; PAM type: YTN; PAM sequence: CTG
gacaccctgcctcaggccct

SEQ ID NO: 13088 - DNA, 20 bp, Artificial Sequence
  Description of Artificial Sequence: Synthetic oligonucleotide
  Target: APOC3; (+) strand; PAM type: YTN; PAM sequence: CTG
cctcaggccctcatctccac

SEQ ID NO: 13089 - DNA, 20 bp, Artificial Sequence
  Description of Artificial Sequence: Synthetic oligonucleotide
  Target: APOC3; (+) strand; PAM type: YTN; PAM sequence: CTC
aggccctcatctccactggt

SEQ ID NO: 13090 - DNA, 20 bp, Artificial Sequence
  Description of Artificial Sequence: Synthetic oligonucleotide
  Target: APOC3; (+) strand; PAM type: YTN; PAM sequence: CTC
atctccactggtcagcaggt

SEQ ID NO: 13091 - DNA, 20 bp, Artificial Sequence
  Description of Artificial Sequence: Synthetic oligonucleotide
  Target: APOC3; (+) strand; PAM type: YTN; PAM sequence: CTC
cactggtcagcaggtgacct

SEQ ID NO: 13092 - DNA, 20 bp, Artificial Sequence
  Description of Artificial Sequence: Synthetic oligonucleotide
  Target: APOC3; (+) strand; PAM type: YTN; PAM sequence: CTG
gtcagcaggtgacctttgcc

SEQ ID NO: 13093 - DNA, 20 bp, Artificial Sequence
  Description of Artificial Sequence: Synthetic oligonucleotide
  Target: APOC3; (+) strand; PAM type: YTN; PAM sequence: CTT
tgcccagcgccctgggtcct

SEQ ID NO: 13094 - DNA, 20 bp, Artificial Sequence
  Description of Artificial Sequence: Synthetic oligonucleotide
  Target: APOC3; (+) strand; PAM type: YTN; PAM sequence: TTT
gcccagcgccctgggtcctc

SEQ ID NO: 13095 - DNA, 20 bp, Artificial Sequence
  Description of Artificial Sequence: Synthetic oligonucleotide
  Target: APOC3; (+) strand; PAM type: YTN; PAM sequence: TTG
cccagcgccctgggtcctca

SEQ ID NO: 13096 - DNA, 20 bp, Artificial Sequence
  Description of Artificial Sequence: Synthetic oligonucleotide
  Target: APOC3; (+) strand; PAM type: YTN; PAM sequence: CTG
ggtcctcagtgcctgctgcc

SEQ ID NO: 13097 - DNA, 20 bp, Artificial Sequence
  Description of Artificial Sequence: Synthetic oligonucleotide
  Target: APOC3; (+) strand; PAM type: YTN; PAM sequence: CTC
agtgcctgctgccctggaga

SEQ ID NO: 13098 - DNA, 20 bp, Artificial Sequence
  Description of Artificial Sequence: Synthetic oligonucleotide
  Target: APOC3; (+) strand; PAM type: YTN; PAM sequence: CTG
ctgccctggagatgatataa

SEQ ID NO: 13099 - DNA, 20 bp, Artificial Sequence
  Description of Artificial Sequence: Synthetic oligonucleotide
  Target: APOC3; (+) strand; PAM type: YTN; PAM sequence: CTG
ccctggagatgatataaaac

SEQ ID NO: 13100 - DNA, 20 bp, Artificial Sequence
  Description of Artificial Sequence: Synthetic oligonucleotide
  Target: APOC3; (+) strand; PAM type: YTN; PAM sequence: CTG
gagatgatataaaacaggtc

SEQ ID NO: 13101 - DNA, 20 bp, Artificial Sequence
  Description of Artificial Sequence: Synthetic oligonucleotide
  Target: APOC3; (+) strand; PAM type: YTN; PAM sequence: CTC
ctgcctgtctgctcagttca

SEQ ID NO: 13102 - DNA, 20 bp, Artificial Sequence
  Description of Artificial Sequence: Synthetic oligonucleotide
  Target: APOC3; (+) strand; PAM type: YTN; PAM sequence: CTG
cctgtctgctcagttcatcc

SEQ ID NO: 13103 - DNA, 20 bp, Artificial Sequence
  Description of Artificial Sequence: Synthetic oligonucleotide
  Target: APOC3; (+) strand; PAM type: YTN; PAM sequence: CTG
tctgctcagttcatccctag

SEQ ID NO: 13104 - DNA, 20 bp, Artificial Sequence
  Description of Artificial Sequence: Synthetic oligonucleotide
  Target: APOC3; (+) strand; PAM type: YTN; PAM sequence: CTG
ctcagttcatccctagaggc

SEQ ID NO: 13105 - DNA, 20 bp, Artificial Sequence
  Description of Artificial Sequence: Synthetic oligonucleotide
  Target: APOC3; (+) strand; PAM type: YTN; PAM sequence: CTC
agttcatccctagaggcagc

SEQ ID NO: 13106 - DNA, 20 bp, Artificial Sequence
  Description of Artificial Sequence: Synthetic oligonucleotide
  Target: APOC3; (+) strand; PAM type: YTN; PAM sequence: TTC
atccctagaggcagctgctc

SEQ ID NO: 13107 - DNA, 20 bp, Artificial Sequence
  Description of Artificial Sequence: Synthetic oligonucleotide
  Target: APOC3; (+) strand; PAM type: YTN; PAM sequence: CTA
gaggcagctgctccaggtaa

SEQ ID NO: 13108 - DNA, 20 bp, Artificial Sequence
  Description of Artificial Sequence: Synthetic oligonucleotide
  Target: APOC3; (+) strand; PAM type: YTN; PAM sequence: CTG
ctccaggtaatgccctctgg

SEQ ID NO: 13109 - DNA, 20 bp, Artificial Sequence
  Description of Artificial Sequence: Synthetic oligonucleotide
  Target: APOC3; (+) strand; PAM type: YTN; PAM sequence: CTC
caggtaatgccctctgggga

SEQ ID NO: 13110 - DNA, 20 bp, Artificial Sequence
  Description of Artificial Sequence: Synthetic oligonucleotide
  Target: APOC3; (+) strand; PAM type: YTN; PAM sequence: CTC
tggggaggggaaagaggagg

SEQ ID NO: 13111 - DNA, 20 bp, Artificial Sequence
  Description of Artificial Sequence: Synthetic oligonucleotide
  Target: APOC3; (+) strand; PAM type: YTN; PAM sequence: CTG
gggaggggaaagaggagggg

SEQ ID NO: 13112 - DNA, 20 bp, Artificial Sequence
  Description of Artificial Sequence: Synthetic oligonucleotide
  Target: APOC3; (+) strand; PAM type: YTN; PAM sequence: CTC
cctgcccagcccagccagca

SEQ ID NO: 13113 - DNA, 20 bp, Artificial Sequence
  Description of Artificial Sequence: Synthetic oligonucleotide
  Target: APOC3; (+) strand; PAM type: YTN; PAM sequence: CTG
cccagcccagccagcaagcc

SEQ ID NO: 13114 - DNA, 20 bp, Artificial Sequence
  Description of Artificial Sequence: Synthetic oligonucleotide
  Target: APOC3; (+) strand; PAM type: YTN; PAM sequence: CTG
gagaagcacttgctagagct

SEQ ID NO: 13115 - DNA, 20 bp, Artificial Sequence
  Description of Artificial Sequence: Synthetic oligonucleotide
  Target: APOC3; (+) strand; PAM type: YTN; PAM sequence: CTT
gctagagctaaggaagcctc

SEQ ID NO: 13116 - DNA, 20 bp, Artificial Sequence
  Description of Artificial Sequence: Synthetic oligonucleotide
  Target: APOC3; (+) strand; PAM type: YTN; PAM sequence: TTG
ctagagctaaggaagcctcg

SEQ ID NO: 13117 - DNA, 20 bp, Artificial Sequence
  Description of Artificial Sequence: Synthetic oligonucleotide
  Target: APOC3; (+) strand; PAM type: YTN; PAM sequence: CTA
gagctaaggaagcctcggag

SEQ ID NO: 13118 - DNA, 20 bp, Artificial Sequence
  Description of Artificial Sequence: Synthetic oligonucleotide
  Target: APOC3; (+) strand; PAM type: YTN; PAM sequence: CTA
aggaagcctcggagctggac

SEQ ID NO: 13119 - DNA, 20 bp, Artificial Sequence
  Description of Artificial Sequence: Synthetic oligonucleotide
  Target: APOC3; (+) strand; PAM type: YTN; PAM sequence: CTC
ggagctggacgggtgccccc

SEQ ID NO: 13120 - DNA, 20 bp, Artificial Sequence
  Description of Artificial Sequence: Synthetic oligonucleotide
  Target: APOC3; (+) strand; PAM type: YTN; PAM sequence: CTG
gacgggtgccccccacccct

SEQ ID NO: 13121 - DNA, 20 bp, Artificial Sequence
  Description of Artificial Sequence: Synthetic oligonucleotide
  Target: APOC3; (+) strand; PAM type: YTN; PAM sequence: CTC
atcataacctgaagaacatg

SEQ ID NO: 13122 - DNA, 20 bp, Artificial Sequence
  Description of Artificial Sequence: Synthetic oligonucleotide
  Target: APOC3; (+) strand; PAM type: YTN; PAM sequence: CTG
aagaacatggaggcccggga

SEQ ID NO: 13123 - DNA, 20 bp, Artificial Sequence
  Description of Artificial Sequence: Synthetic oligonucleotide
  Target: APOC3; (+) strand; PAM type: YTN; PAM sequence: CTT
gcccaaagctacacaggggg

SEQ ID NO: 13124 - DNA, 20 bp, Artificial Sequence
  Description of Artificial Sequence: Synthetic oligonucleotide
  Target: APOC3; (+) strand; PAM type: YTN; PAM sequence: TTG
cccaaagctacacagggggt

SEQ ID NO: 13125 - DNA, 20 bp, Artificial Sequence
  Description of Artificial Sequence: Synthetic oligonucleotide
  Target: APOC3; (+) strand; PAM type: YTN; PAM sequence: CTA
cacagggggtggggctggaa

SEQ ID NO: 13126 - DNA, 20 bp, Artificial Sequence
  Description of Artificial Sequence: Synthetic oligonucleotide
  Target: APOC3; (+) strand; PAM type: YTN; PAM sequence: CTG
gaagtggctccaagtgcagg

SEQ ID NO: 13127 - DNA, 20 bp, Artificial Sequence
  Description of Artificial Sequence: Synthetic oligonucleotide
  Target: APOC3; (+) strand; PAM type: YTN; PAM sequence: CTC
caagtgcaggttcccccctc

SEQ ID NO: 13128 - DNA, 20 bp, Artificial Sequence
  Description of Artificial Sequence: Synthetic oligonucleotide
  Target: APOC3; (+) strand; PAM type: YTN; PAM sequence: TTC
ccccctcattcttcaggctt

SEQ ID NO: 13129 - DNA, 20 bp, Artificial Sequence
  Description of Artificial Sequence: Synthetic oligonucleotide
  Target: APOC3; (+) strand; PAM type: YTN; PAM sequence: CTC
attcttcaggcttagggctg

SEQ ID NO: 13130 - DNA, 20 bp, Artificial Sequence
  Description of Artificial Sequence: Synthetic oligonucleotide
  Target: APOC3; (+) strand; PAM type: YTN; PAM sequence: TTC
ttcaggcttagggctggagg

SEQ ID NO: 13131 - DNA, 20 bp, Artificial Sequence
  Description of Artificial Sequence: Synthetic oligonucleotide
  Target: APOC3; (+) strand; PAM type: YTN; PAM sequence: CTT
caggcttagggctggaggaa

SEQ ID NO: 13132 - DNA, 20 bp, Artificial Sequence
  Description of Artificial Sequence: Synthetic oligonucleotide
  Target: APOC3; (+) strand; PAM type: YTN; PAM sequence: TTC
aggcttagggctggaggaag

SEQ ID NO: 13133 - DNA, 20 bp, Artificial Sequence
  Description of Artificial Sequence: Synthetic oligonucleotide
  Target: APOC3; (+) strand; PAM type: YTN; PAM sequence: CTT
agggctggaggaagccttag

SEQ ID NO: 13134 - DNA, 20 bp, Artificial Sequence
  Description of Artificial Sequence: Synthetic oligonucleotide
  Target: APOC3; (+) strand; PAM type: YTN; PAM sequence: TTA
gggctggaggaagccttaga

SEQ ID NO: 13135 - DNA, 20 bp, Artificial Sequence
  Description of Artificial Sequence: Synthetic oligonucleotide
  Target: APOC3; (+) strand; PAM type: YTN; PAM sequence: CTG
gaggaagccttagacagccc

SEQ ID NO: 13136 - DNA, 20 bp, Artificial Sequence
  Description of Artificial Sequence: Synthetic oligonucleotide
  Target: APOC3; (+) strand; PAM type: YTN; PAM sequence: CTT
agacagcccagtcctacccc

SEQ ID NO: 13137 - DNA, 20 bp, Artificial Sequence
  Description of Artificial Sequence: Synthetic oligonucleotide
  Target: APOC3; (+) strand; PAM type: YTN; PAM sequence: TTA
gacagcccagtcctacccca

SEQ ID NO: 13138 - DNA, 20 bp, Artificial Sequence
  Description of Artificial Sequence: Synthetic oligonucleotide
  Target: APOC3; (+) strand; PAM type: YTN; PAM sequence: CTA
ccccagacagggaaactgag

SEQ ID NO: 13139 - DNA, 20 bp, Artificial Sequence
  Description of Artificial Sequence: Synthetic oligonucleotide
  Target: APOC3; (+) strand; PAM type: YTN; PAM sequence: CTG
aggcctggagagggccagaa

SEQ ID NO: 13140 - DNA, 20 bp, Artificial Sequence
  Description of Artificial Sequence: Synthetic oligonucleotide
  Target: APOC3; (+) strand; PAM type: YTN; PAM sequence: CTG
gagagggccagaaatcaccc

SEQ ID NO: 13141 - DNA, 20 bp, Artificial Sequence
  Description of Artificial Sequence: Synthetic oligonucleotide
  Target: APOC3; (+) strand; PAM type: YTN; PAM sequence: TTG
gctggactggacggagatca

SEQ ID NO: 13142 - DNA, 20 bp, Artificial Sequence
  Description of Artificial Sequence: Synthetic oligonucleotide
  Target: APOC3; (+) strand; PAM type: YTN; PAM sequence: CTG
gactggacggagatcagtcc

SEQ ID NO: 13143 - DNA, 20 bp, Artificial Sequence
  Description of Artificial Sequence: Synthetic oligonucleotide
  Target: APOC3; (+) strand; PAM type: YTN; PAM sequence: CTG
gacggagatcagtccagacc

SEQ ID NO: 13144 - DNA, 20 bp, Artificial Sequence
  Description of Artificial Sequence: Synthetic oligonucleotide
  Target: APOC3; (+) strand; PAM type: YTN; PAM sequence: CTT
gatgttcagtctggtgggtt

SEQ ID NO: 13145 - DNA, 20 bp, Artificial Sequence
  Description of Artificial Sequence: Synthetic oligonucleotide
  Target: APOC3; (+) strand; PAM type: YTN; PAM sequence: TTG
atgttcagtctggtgggttt

SEQ ID NO: 13146 - DNA, 20 bp, Artificial Sequence
  Description of Artificial Sequence: Synthetic oligonucleotide
  Target: APOC3; (+) strand; PAM type: YTN; PAM sequence: TTC
agtctggtgggttttctgct

SEQ ID NO: 13147 - DNA, 20 bp, Artificial Sequence
  Description of Artificial Sequence: Synthetic oligonucleotide
  Target: APOC3; (+) strand; PAM type: YTN; PAM sequence: CTG
gtgggttttctgctccatcc

SEQ ID NO: 13148 - DNA, 20 bp, Artificial Sequence
  Description of Artificial Sequence: Synthetic oligonucleotide
  Target: APOC3; (+) strand; PAM type: YTN; PAM sequence: TTT
tctgctccatcccacccacc

SEQ ID NO: 13149 - DNA, 20 bp, Artificial Sequence
  Description of Artificial Sequence: Synthetic oligonucleotide
  Target: APOC3; (+) strand; PAM type: YTN; PAM sequence: TTT
ctgctccatcccacccacct

SEQ ID NO: 13150 - DNA, 20 bp, Artificial Sequence
  Description of Artificial Sequence: Synthetic oligonucleotide
  Target: APOC3; (+) strand; PAM type: YTN; PAM sequence: TTC
tgctccatcccacccacctc

SEQ ID NO: 13151 - DNA, 20 bp, Artificial Sequence
  Description of Artificial Sequence: Synthetic oligonucleotide
  Target: APOC3; (+) strand; PAM type: YTN; PAM sequence: CTG
ctccatcccacccacctccc

SEQ ID NO: 13152 - DNA, 20 bp, Artificial Sequence
  Description of Artificial Sequence: Synthetic oligonucleotide
  Target: APOC3; (+) strand; PAM type: YTN; PAM sequence: CTC
catcccacccacctcccttt

SEQ ID NO: 13153 - DNA, 20 bp, Artificial Sequence
  Description of Artificial Sequence: Synthetic oligonucleotide
  Target: APOC3; (+) strand; PAM type: YTN; PAM sequence: CTC
cctttgggcctcgatccctc

SEQ ID NO: 13154 - DNA, 20 bp, Artificial Sequence
  Description of Artificial Sequence: Synthetic oligonucleotide
  Target: APOC3; (+) strand; PAM type: YTN; PAM sequence: CTT
tgggcctcgatccctcgccc

SEQ ID NO: 13155 - DNA, 20 bp, Artificial Sequence
  Description of Artificial Sequence: Synthetic oligonucleotide
  Target: APOC3; (+) strand; PAM type: YTN; PAM sequence: TTT
gggcctcgatccctcgcccc

SEQ ID NO: 13156 - DNA, 20 bp, Artificial Sequence
  Description of Artificial Sequence: Synthetic oligonucleotide
  Target: APOC3; (+) strand; PAM type: YTN; PAM sequence: TTG
ggcctcgatccctcgcccct

SEQ ID NO: 13157 - DNA, 20 bp, Artificial Sequence
  Description of Artificial Sequence: Synthetic oligonucleotide
  Target: APOC3; (+) strand; PAM type: YTN; PAM sequence: CTC
gatccctcgcccctcaccag

SEQ ID NO: 13158 - DNA, 20 bp, Artificial Sequence
  Description of Artificial Sequence: Synthetic oligonucleotide
  Target: APOC3; (+) strand; PAM type: YTN; PAM sequence: CTC
gcccctcaccagtccccctt

SEQ ID NO: 13159 - DNA, 20 bp, Artificial Sequence
  Description of Artificial Sequence: Synthetic oligonucleotide
  Target: APOC3; (+) strand; PAM type: YTN; PAM sequence: CTC
accagtcccccttctgagag

SEQ ID NO: 13160 - DNA, 20 bp, Artificial Sequence
  Description of Artificial Sequence: Synthetic oligonucleotide
  Target: APOC3; (+) strand; PAM type: YTN; PAM sequence: CTT
ctgagagcccgtattagcag

SEQ ID NO: 13161 - DNA, 20 bp, Artificial Sequence
  Description of Artificial Sequence: Synthetic oligonucleotide
  Target: APOC3; (+) strand; PAM type: YTN; PAM sequence: TTC
tgagagcccgtattagcagg

SEQ ID NO: 13162 - DNA, 20 bp, Artificial Sequence
  Description of Artificial Sequence: Synthetic oligonucleotide
  Target: APOC3; (+) strand; PAM type: YTN; PAM sequence: CTG
agagcccgtattagcaggga

SEQ ID NO: 13163 - DNA, 20 bp, Artificial Sequence
  Description of Artificial Sequence: Synthetic oligonucleotide
  Target: APOC3; (+) strand; PAM type: YTN; PAM sequence: TTA
gcagggagccggcccctact

SEQ ID NO: 13164 - DNA, 20 bp, Artificial Sequence
  Description of Artificial Sequence: Synthetic oligonucleotide
  Target: APOC3; (+) strand; PAM type: YTN; PAM sequence: CTA
ctccttctggcagacccagc

SEQ ID NO: 13165 - DNA, 20 bp, Artificial Sequence
  Description of Artificial Sequence: Synthetic oligonucleotide
  Target: APOC3; (+) strand; PAM type: YTN; PAM sequence: CTC
cttctggcagacccagctaa

SEQ ID NO: 13166 - DNA, 20 bp, Artificial Sequence
  Description of Artificial Sequence: Synthetic oligonucleotide
  Target: APOC3; (+) strand; PAM type: YTN; PAM sequence: CTT
ctggcagacccagctaaggt

SEQ ID NO: 13167 - DNA, 20 bp, Artificial Sequence
  Description of Artificial Sequence: Synthetic oligonucleotide
  Target: APOC3; (+) strand; PAM type: YTN; PAM sequence: TTC
tggcagacccagctaaggtt

SEQ ID NO: 13168 - DNA, 20 bp, Artificial Sequence
  Description of Artificial Sequence: Synthetic oligonucleotide
  Target: APOC3; (+) strand; PAM type: YTN; PAM sequence: CTG
gcagacccagctaaggttct

SEQ ID NO: 13169 - DNA, 20 bp, Artificial Sequence
  Description of Artificial Sequence: Synthetic oligonucleotide
  Target: APOC3; (+) strand; PAM type: YTN; PAM sequence: CTA
aggttctaccttaggggcca

SEQ ID NO: 13170 - DNA, 20 bp, Artificial Sequence
  Description of Artificial Sequence: Synthetic oligonucleotide
  Target: APOC3; (+) strand; PAM type: YTN; PAM sequence: TTC
taccttaggggccacgccac

SEQ ID NO: 13171 - DNA, 20 bp, Artificial Sequence
  Description of Artificial Sequence: Synthetic oligonucleotide
  Target: APOC3; (+) strand; PAM type: YTN; PAM sequence: CTA
ccttaggggccacgccacct

SEQ ID NO: 13172 - DNA, 20 bp, Artificial Sequence
  Description of Artificial Sequence: Synthetic oligonucleotide
  Target: APOC3; (+) strand; PAM type: YTN; PAM sequence: CTT
aggggccacgccacctcccc

SEQ ID NO: 13173 - DNA, 20 bp, Artificial Sequence
  Description of Artificial Sequence: Synthetic oligonucleotide
  Target: APOC3; (+) strand; PAM type: YTN; PAM sequence: TTA
ggggccacgccacctcccca

SEQ ID NO: 13174 - DNA, 20 bp, Artificial Sequence
  Description of Artificial Sequence: Synthetic oligonucleotide
  Target: APOC3; (+) strand; PAM type: YTN; PAM sequence: CTC
cccagggaggggtccagagg

SEQ ID NO: 13175 - DNA, 20 bp, Artificial Sequence
  Description of Artificial Sequence: Synthetic oligonucleotide
  Target: APOC3; (+) strand; PAM type: YTN; PAM sequence: CTG
gggtgcccctcacaggacac

SEQ ID NO: 13176 - DNA, 20 bp, Artificial Sequence
  Description of Artificial Sequence: Synthetic oligonucleotide
  Target: APOC3; (+) strand; PAM type: YTN; PAM sequence: CTC
acaggacacttccttgcagg

SEQ ID NO: 13177 - DNA, 20 bp, Artificial Sequence
  Description of Artificial Sequence: Synthetic oligonucleotide
  Target: APOC3; (+) strand; PAM type: YTN; PAM sequence: CTT
ccttgcaggaacagaggtgc

SEQ ID NO: 13178 - DNA, 20 bp, Artificial Sequence
  Description of Artificial Sequence: Synthetic oligonucleotide
  Target: APOC3; (+) strand; PAM type: YTN; PAM sequence: TTC
cttgcaggaacagaggtgcc

SEQ ID NO: 13179 - DNA, 20 bp, Artificial Sequence
  Description of Artificial Sequence: Synthetic oligonucleotide
  Target: APOC3; (+) strand; PAM type: YTN; PAM sequence: CTT
gcaggaacagaggtgccatg

SEQ ID NO: 13180 - DNA, 20 bp, Artificial Sequence
  Description of Artificial Sequence: Synthetic oligonucleotide
  Target: APOC3; (+) strand; PAM type: YTN; PAM sequence: TTG
caggaacagaggtgccatgc

SEQ ID NO: 13181 - DNA, 20 bp, Artificial Sequence
  Description of Artificial Sequence: Synthetic oligonucleotide
  Target: APOC3; (+) strand; PAM type: YTN; PAM sequence: CTC
cttgttgttgccctcctggc

SEQ ID NO: 13182 - DNA, 20 bp, Artificial Sequence
  Description of Artificial Sequence: Synthetic oligonucleotide
  Target: APOC3; (+) strand; PAM type: YTN; PAM sequence: CTT
gttgttgccctcctggcgct

SEQ ID NO: 13183 - DNA, 20 bp, Artificial Sequence
  Description of Artificial Sequence: Synthetic oligonucleotide
  Target: APOC3; (+) strand; PAM type: YTN; PAM sequence: TTG
ttgttgccctcctggcgctc

SEQ ID NO: 13184 - DNA, 20 bp, Artificial Sequence
  Description of Artificial Sequence: Synthetic oligonucleotide
  Target: APOC3; (+) strand; PAM type: YTN; PAM sequence: TTG
ttgccctcctggcgctcctg

SEQ ID NO: 13185 - DNA, 20 bp, Artificial Sequence
  Description of Artificial Sequence: Synthetic oligonucleotide
  Target: APOC3; (+) strand; PAM type: YTN; PAM sequence: TTG
ccctcctggcgctcctggcc

SEQ ID NO: 13186 - DNA, 20 bp, Artificial Sequence
  Description of Artificial Sequence: Synthetic oligonucleotide
  Target: APOC3; (+) strand; PAM type: YTN; PAM sequence: CTC
ctggcgctcctggcctctgc

SEQ ID NO: 13187 - DNA, 20 bp, Artificial Sequence
  Description of Artificial Sequence: Synthetic oligonucleotide
  Target: APOC3; (+) strand; PAM type: YTN; PAM sequence: CTG
gcgctcctggcctctgcccg

SEQ ID NO: 13188 - DNA, 20 bp, Artificial Sequence
  Description of Artificial Sequence: Synthetic oligonucleotide
  Target: APOC3; (+) strand; PAM type: YTN; PAM sequence: CTC
ctggcctctgcccgtaagca

SEQ ID NO: 13189 - DNA, 20 bp, Artificial Sequence
  Description of Artificial Sequence: Synthetic oligonucleotide
  Target: APOC3; (+) strand; PAM type: YTN; PAM sequence: CTG
gcctctgcccgtaagcactt

SEQ ID NO: 13190 - DNA, 20 bp, Artificial Sequence
  Description of Artificial Sequence: Synthetic oligonucleotide
  Target: APOC3; (+) strand; PAM type: YTN; PAM sequence: CTC
tgcccgtaagcacttggtgg

SEQ ID NO: 13191 - DNA, 20 bp, Artificial Sequence
  Description of Artificial Sequence: Synthetic oligonucleotide
  Target: APOC3; (+) strand; PAM type: YTN; PAM sequence: CTG
cccgtaagcacttggtggga

SEQ ID NO: 13192 - DNA, 20 bp, Artificial Sequence
  Description of Artificial Sequence: Synthetic oligonucleotide
  Target: APOC3; (+) strand; PAM type: YTN; PAM sequence: CTT
ggtgggactgggctgggggc

SEQ ID NO: 13193 - DNA, 20 bp, Artificial Sequence
  Description of Artificial Sequence: Synthetic oligonucleotide
  Target: APOC3; (+) strand; PAM type: YTN; PAM sequence: TTG
gtgggactgggctgggggca

SEQ ID NO: 13194 - DNA, 20 bp, Artificial Sequence
  Description of Artificial Sequence: Synthetic oligonucleotide
  Target: APOC3; (+) strand; PAM type: YTN; PAM sequence: CTG
ggctgggggcagggtggagg

SEQ ID NO: 13195 - DNA, 20 bp, Artificial Sequence
  Description of Artificial Sequence: Synthetic oligonucleotide
  Target: APOC3; (+) strand; PAM type: YTN; PAM sequence: CTG
ggggcagggtggaggcaact

SEQ ID NO: 13196 - DNA, 20 bp, Artificial Sequence
  Description of Artificial Sequence: Synthetic oligonucleotide
  Target: APOC3; (+) strand; PAM type: YTN; PAM sequence: CTT
ggggatcccagtcccaatgg

SEQ ID NO: 13197 - DNA, 20 bp, Artificial Sequence
  Description of Artificial Sequence: Synthetic oligonucleotide
  Target: APOC3; (+) strand; PAM type: YTN; PAM sequence: TTG
gggatcccagtcccaatggg

SEQ ID NO: 13198 - DNA, 20 bp, Artificial Sequence
  Description of Artificial Sequence: Synthetic oligonucleotide
  Target: APOC3; (+) strand; PAM type: YTN; PAM sequence: CTC
gtccagaggccgatccaccc

SEQ ID NO: 13199 - DNA, 20 bp, Artificial Sequence
  Description of Artificial Sequence: Synthetic oligonucleotide
  Target: APOC3; (+) strand; PAM type: YTN; PAM sequence: CTC
agccctgctctttcctcagg

SEQ ID NO: 13200 - DNA, 20 bp, Artificial Sequence
  Description of Artificial Sequence: Synthetic oligonucleotide
  Target: APOC3; (+) strand; PAM type: YTN; PAM sequence: CTG
ctctttcctcaggagcttca

SEQ ID NO: 13201 - DNA, 20 bp, Artificial Sequence
  Description of Artificial Sequence: Synthetic oligonucleotide
  Target: APOC3; (+) strand; PAM type: YTN; PAM sequence: CTC
tttcctcaggagcttcagag

SEQ ID NO: 13202 - DNA, 20 bp, Artificial Sequence
  Description of Artificial Sequence: Synthetic oligonucleotide
  Target: APOC3; (+) strand; PAM type: YTN; PAM sequence: CTT
tcctcaggagcttcagaggc

SEQ ID NO: 13203 - DNA, 20 bp, Artificial Sequence
  Description of Artificial Sequence: Synthetic oligonucleotide
  Target: APOC3; (+) strand; PAM type: YTN; PAM sequence: TTT
cctcaggagcttcagaggcc

SEQ ID NO: 13204 - DNA, 20 bp, Artificial Sequence
  Description of Artificial Sequence: Synthetic oligonucleotide
  Target: APOC3; (+) strand; PAM type: YTN; PAM sequence: TTC
ctcaggagcttcagaggccg

SEQ ID NO: 13205 - DNA, 20 bp, Artificial Sequence
  Description of Artificial Sequence: Synthetic oligonucleotide
  Target: APOC3; (+) strand; PAM type: YTN; PAM sequence: CTC
aggagcttcagaggccgagg

SEQ ID NO: 13206 - DNA, 20 bp, Artificial Sequence
  Description of Artificial Sequence: Synthetic oligonucleotide
  Target: APOC3; (+) strand; PAM type: YTN; PAM sequence: CTT
cagaggccgaggatgcctcc

SEQ ID NO: 13207 - DNA, 20 bp, Artificial Sequence
  Description of Artificial Sequence: Synthetic oligonucleotide
  Target: APOC3; (+) strand; PAM type: YTN; PAM sequence: TTC
agaggccgaggatgcctccc

SEQ ID NO: 13208 - DNA, 20 bp, Artificial Sequence
  Description of Artificial Sequence: Synthetic oligonucleotide
  Target: APOC3; (+) strand; PAM type: YTN; PAM sequence: CTC
ccttctcagcttcatgcagg

SEQ ID NO: 13209 - DNA, 20 bp, Artificial Sequence
  Description of Artificial Sequence: Synthetic oligonucleotide
  Target: APOC3; (+) strand; PAM type: YTN; PAM sequence: CTT
ctcagcttcatgcagggtta

SEQ ID NO: 13210 - DNA, 20 bp, Artificial Sequence
  Description of Artificial Sequence: Synthetic oligonucleotide
  Target: APOC3; (+) strand; PAM type: YTN; PAM sequence: TTC
tcagcttcatgcagggttac

SEQ ID NO: 13211 - DNA, 20 bp, Artificial Sequence
  Description of Artificial Sequence: Synthetic oligonucleotide
  Target: APOC3; (+) strand; PAM type: YTN; PAM sequence: CTC
agcttcatgcagggttacat

SEQ ID NO: 13212 - DNA, 20 bp, Artificial Sequence
  Description of Artificial Sequence: Synthetic oligonucleotide
  Target: APOC3; (+) strand; PAM type: YTN; PAM sequence: CTT
catgcagggttacatgaagc

SEQ ID NO: 13213 - DNA, 20 bp, Artificial Sequence
  Description of Artificial Sequence: Synthetic oligonucleotide
  Target: APOC3; (+) strand; PAM type: YTN; PAM sequence: TTC
atgcagggttacatgaagca

SEQ ID NO: 13214 - DNA, 20 bp, Artificial Sequence
  Description of Artificial Sequence: Synthetic oligonucleotide
  Target: APOC3; (+) strand; PAM type: YTN; PAM sequence: TTA
catgaagcacgccaccaaga

SEQ ID NO: 13215 - DNA, 20 bp, Artificial Sequence
  Description of Artificial Sequence: Synthetic oligonucleotide
  Target: APOC3; (+) strand; PAM type: YTN; PAM sequence: CTG
agcagcgtgcaggagtccca

SEQ ID NO: 13216 - DNA, 20 bp, Artificial Sequence
  Description of Artificial Sequence: Synthetic oligonucleotide
  Target: APOC3; (+) strand; PAM type: YTN; PAM sequence: CTG
gcctccctccccatcccccc

SEQ ID NO: 13217 - DNA, 20 bp, Artificial Sequence
  Description of Artificial Sequence: Synthetic oligonucleotide
  Target: APOC3; (+) strand; PAM type: YTN; PAM sequence: CTC
cctccccatcccccctgcca

SEQ ID NO: 13218 - DNA, 20 bp, Artificial Sequence
  Description of Artificial Sequence: Synthetic oligonucleotide
  Target: APOC3; (+) strand; PAM type: YTN; PAM sequence: CTC
cccatcccccctgccagctg

SEQ ID NO: 13219 - DNA, 20 bp, Artificial Sequence
  Description of Artificial Sequence: Synthetic oligonucleotide
  Target: APOC3; (+) strand; PAM type: YTN; PAM sequence: CTG
ccagctgcctccattcccac

SEQ ID NO: 13220 - DNA, 20 bp, Artificial Sequence
  Description of Artificial Sequence: Synthetic oligonucleotide
  Target: APOC3; (+) strand; PAM type: YTN; PAM sequence: CTG
cctccattcccacccgcccc

SEQ ID NO: 13221 - DNA, 20 bp, Artificial Sequence
  Description of Artificial Sequence: Synthetic oligonucleotide
  Target: APOC3; (+) strand; PAM type: YTN; PAM sequence: CTC
cattcccacccgcccctgcc

SEQ ID NO: 13222 - DNA, 20 bp, Artificial Sequence
  Description of Artificial Sequence: Synthetic oligonucleotide
  Target: APOC3; (+) strand; PAM type: YTN; PAM sequence: TTC
ccacccgcccctgccctggt

SEQ ID NO: 13223 - DNA, 20 bp, Artificial Sequence
  Description of Artificial Sequence: Synthetic oligonucleotide
  Target: APOC3; (+) strand; PAM type: YTN; PAM sequence: CTG
ccctggtgagatcccaacaa

SEQ ID NO: 13224 - DNA, 20 bp, Artificial Sequence
  Description of Artificial Sequence: Synthetic oligonucleotide
  Target: APOC3; (+) strand; PAM type: YTN; PAM sequence: CTG
gtgagatcccaacaatggaa

SEQ ID NO: 13225 - DNA, 20 bp, Artificial Sequence
  Description of Artificial Sequence: Synthetic oligonucleotide
  Target: APOC3; (+) strand; PAM type: YTN; PAM sequence: CTC
cagcctcccctgggcctgtg

SEQ ID NO: 13226 - DNA, 20 bp, Artificial Sequence
  Description of Artificial Sequence: Synthetic oligonucleotide
  Target: APOC3; (+) strand; PAM type: YTN; PAM sequence: CTC
ccctgggcctgtgcctcttc

SEQ ID NO: 13227 - DNA, 20 bp, Artificial Sequence
  Description of Artificial Sequence: Synthetic oligonucleotide
  Target: APOC3; (+) strand; PAM type: YTN; PAM sequence: CTG
ggcctgtgcctcttcagcct

SEQ ID NO: 13228 - DNA, 20 bp, Artificial Sequence
  Description of Artificial Sequence: Synthetic oligonucleotide
  Target: APOC3; (+) strand; PAM type: YTN; PAM sequence: CTG
tgcctcttcagcctcctctt

SEQ ID NO: 13229 - DNA, 20 bp, Artificial Sequence
  Description of Artificial Sequence: Synthetic oligonucleotide
  Target: APOC3; (+) strand; PAM type: YTN; PAM sequence: CTC
ttcagcctcctctttcctca

SEQ ID NO: 13230 - DNA, 20 bp, Artificial Sequence
  Description of Artificial Sequence: Synthetic oligonucleotide
  Target: APOC3; (+) strand; PAM type: YTN; PAM sequence: CTT
cagcctcctctttcctcaca

SEQ ID NO: 13231 - DNA, 20 bp, Artificial Sequence
  Description of Artificial Sequence: Synthetic oligonucleotide
  Target: APOC3; (+) strand; PAM type: YTN; PAM sequence: TTC
agcctcctctttcctcacag

SEQ ID NO: 13232 - DNA, 20 bp, Artificial Sequence
  Description of Artificial Sequence: Synthetic oligonucleotide
  Target: APOC3; (+) strand; PAM type: YTN; PAM sequence: CTC
ctctttcctcacagggcctt

SEQ ID NO: 13233 - DNA, 20 bp, Artificial Sequence
  Description of Artificial Sequence: Synthetic oligonucleotide
  Target: APOC3; (+) strand; PAM type: YTN; PAM sequence: CTC
tttcctcacagggcctttgt

SEQ ID NO: 13234 - DNA, 20 bp, Artificial Sequence
  Description of Artificial Sequence: Synthetic oligonucleotide
  Target: APOC3; (+) strand; PAM type: YTN; PAM sequence: CTT
tcctcacagggcctttgtca

SEQ ID NO: 13235 - DNA, 20 bp, Artificial Sequence
  Description of Artificial Sequence: Synthetic oligonucleotide
  Target: APOC3; (+) strand; PAM type: YTN; PAM sequence: TTT
cctcacagggcctttgtcag

SEQ ID NO: 13236 - DNA, 20 bp, Artificial Sequence
  Description of Artificial Sequence: Synthetic oligonucleotide
  Target: APOC3; (+) strand; PAM type: YTN; PAM sequence: TTC
ctcacagggcctttgtcagg

SEQ ID NO: 13237 - DNA, 20 bp, Artificial Sequence
  Description of Artificial Sequence: Synthetic oligonucleotide
  Target: APOC3; (+) strand; PAM type: YTN; PAM sequence: CTC
acagggcctttgtcaggctg

SEQ ID NO: 13238 - DNA, 20 bp, Artificial Sequence
  Description of Artificial Sequence: Synthetic oligonucleotide
  Target: APOC3; (+) strand; PAM type: YTN; PAM sequence: CTT
tgtcaggctgctgcgggaga

SEQ ID NO: 13239 - DNA, 20 bp, Artificial Sequence
  Description of Artificial Sequence: Synthetic oligonucleotide
  Target: APOC3; (+) strand; PAM type: YTN; PAM sequence: TTT
gtcaggctgctgcgggagag

SEQ ID NO: 13240 - DNA, 20 bp, Artificial Sequence
  Description of Artificial Sequence: Synthetic oligonucleotide
  Target: APOC3; (+) strand; PAM type: YTN; PAM sequence: TTG
tcaggctgctgcgggagaga

SEQ ID NO: 13241 - DNA, 20 bp, Artificial Sequence
  Description of Artificial Sequence: Synthetic oligonucleotide
  Target: APOC3; (+) strand; PAM type: YTN; PAM sequence: CTG
ctgcgggagagatgacagag

SEQ ID NO: 13242 - DNA, 20 bp, Artificial Sequence
  Description of Artificial Sequence: Synthetic oligonucleotide
  Target: APOC3; (+) strand; PAM type: YTN; PAM sequence: CTG
cgggagagatgacagagttg

SEQ ID NO: 13243 - DNA, 20 bp, Artificial Sequence
  Description of Artificial Sequence: Synthetic oligonucleotide
  Target: APOC3; (+) strand; PAM type: YTN; PAM sequence: TTG
agactgcattcctcccaggt

SEQ ID NO: 13244 - DNA, 20 bp, Artificial Sequence
  Description of Artificial Sequence: Synthetic oligonucleotide
  Target: APOC3; (+) strand; PAM type: YTN; PAM sequence: CTG
cattcctcccaggtccctcc

SEQ ID NO: 13245 - DNA, 20 bp, Artificial Sequence
  Description of Artificial Sequence: Synthetic oligonucleotide
  Target: APOC3; (+) strand; PAM type: YTN; PAM sequence: TTC
ctcccaggtccctcctttct

SEQ ID NO: 13246 - DNA, 20 bp, Artificial Sequence
  Description of Artificial Sequence: Synthetic oligonucleotide
  Target: APOC3; (+) strand; PAM type: YTN; PAM sequence: CTC
ccaggtccctcctttctccc

SEQ ID NO: 13247 - DNA, 20 bp, Artificial Sequence
  Description of Artificial Sequence: Synthetic oligonucleotide
  Target: APOC3; (+) strand; PAM type: YTN; PAM sequence: CTC
ctttctccccggagcagtcc

SEQ ID NO: 13248 - DNA, 20 bp, Artificial Sequence
  Description of Artificial Sequence: Synthetic oligonucleotide
  Target: APOC3; (+) strand; PAM type: YTN; PAM sequence: CTT
tctccccggagcagtcctag

SEQ ID NO: 13249 - DNA, 20 bp, Artificial Sequence
  Description of Artificial Sequence: Synthetic oligonucleotide
  Target: APOC3; (+) strand; PAM type: YTN; PAM sequence: TTT
ctccccggagcagtcctagg

SEQ ID NO: 13250 - DNA, 20 bp, Artificial Sequence
  Description of Artificial Sequence: Synthetic oligonucleotide
  Target: APOC3; (+) strand; PAM type: YTN; PAM sequence: TTC
tccccggagcagtcctaggg

SEQ ID NO: 13251 - DNA, 20 bp, Artificial Sequence
  Description of Artificial Sequence: Synthetic oligonucleotide
  Target: APOC3; (+) strand; PAM type: YTN; PAM sequence: CTC
cccggagcagtcctagggcg

SEQ ID NO: 13252 - DNA, 20 bp, Artificial Sequence
  Description of Artificial Sequence: Synthetic oligonucleotide
  Target: APOC3; (+) strand; PAM type: YTN; PAM sequence: CTA
gggcgtgccgttttagccct

SEQ ID NO: 13253 - DNA, 20 bp, Artificial Sequence
  Description of Artificial Sequence: Synthetic oligonucleotide
  Target: APOC3; (+) strand; PAM type: YTN; PAM sequence: TTT
tagccctcatttccattttc

SEQ ID NO: 13254 - DNA, 20 bp, Artificial Sequence
  Description of Artificial Sequence: Synthetic oligonucleotide
  Target: APOC3; (+) strand; PAM type: YTN; PAM sequence: TTT
agccctcatttccattttcc

SEQ ID NO: 13255 - DNA, 20 bp, Artificial Sequence
  Description of Artificial Sequence: Synthetic oligonucleotide
  Target: APOC3; (+) strand; PAM type: YTN; PAM sequence: TTA
gccctcatttccattttcct

SEQ ID NO: 13256 - DNA, 20 bp, Artificial Sequence
  Description of Artificial Sequence: Synthetic oligonucleotide
  Target: APOC3; (+) strand; PAM type: YTN; PAM sequence: CTC
atttccattttcctttcctt

SEQ ID NO: 13257 - DNA, 20 bp, Artificial Sequence
  Description of Artificial Sequence: Synthetic oligonucleotide
  Target: APOC3; (+) strand; PAM type: YTN; PAM sequence: TTT
ccattttcctttcctttccc

SEQ ID NO: 13258 - DNA, 20 bp, Artificial Sequence
  Description of Artificial Sequence: Synthetic oligonucleotide
  Target: APOC3; (+) strand; PAM type: YTN; PAM sequence: TTC
cattttcctttcctttccct

SEQ ID NO: 13259 - DNA, 20 bp, Artificial Sequence
  Description of Artificial Sequence: Synthetic oligonucleotide
  Target: APOC3; (+) strand; PAM type: YTN; PAM sequence: TTT
tcctttcctttccctttctt

SEQ ID NO: 13260 - DNA, 20 bp, Artificial Sequence
  Description of Artificial Sequence: Synthetic oligonucleotide
  Target: APOC3; (+) strand; PAM type: YTN; PAM sequence: TTT
cctttcctttccctttcttt

SEQ ID NO: 13261 - DNA, 20 bp, Artificial Sequence
  Description of Artificial Sequence: Synthetic oligonucleotide
  Target: APOC3; (+) strand; PAM type: YTN; PAM sequence: TTC
ctttcctttccctttctttc

SEQ ID NO: 13262 - DNA, 20 bp, Artificial Sequence
  Description of Artificial Sequence: Synthetic oligonucleotide
  Target: APOC3; (+) strand; PAM type: YTN; PAM sequence: CTT
tcctttccctttctttctct

SEQ ID NO: 13263 - DNA, 20 bp, Artificial Sequence
  Description of Artificial Sequence: Synthetic oligonucleotide
  Target: APOC3; (+) strand; PAM type: YTN; PAM sequence: TTT
cctttccctttctttctctt

SEQ ID NO: 13264 - DNA, 20 bp, Artificial Sequence
  Description of Artificial Sequence: Synthetic oligonucleotide
  Target: APOC3; (+) strand; PAM type: YTN; PAM sequence: TTC
ctttccctttctttctcttt

SEQ ID NO: 13265 - DNA, 20 bp, Artificial Sequence
  Description of Artificial Sequence: Synthetic oligonucleotide
  Target: APOC3; (+) strand; PAM type: YTN; PAM sequence: CTT
tccctttctttctctttcta

SEQ ID NO: 13266 - DNA, 20 bp, Artificial Sequence
  Description of Artificial Sequence: Synthetic oligonucleotide
  Target: APOC3; (+) strand; PAM type: YTN; PAM sequence: TTT
ccctttctttctctttctat

SEQ ID NO: 13267 - DNA, 20 bp, Artificial Sequence
  Description of Artificial Sequence: Synthetic oligonucleotide
  Target: APOC3; (+) strand; PAM type: YTN; PAM sequence: TTC
cctttctttctctttctatt

SEQ ID NO: 13268 - DNA, 20 bp, Artificial Sequence
  Description of Artificial Sequence: Synthetic oligonucleotide
  Target: APOC3; (+) strand; PAM type: YTN; PAM sequence: CTT
tctttctctttctatttctt

SEQ ID NO: 13269 - DNA, 20 bp, Artificial Sequence
  Description of Artificial Sequence: Synthetic oligonucleotide
  Target: APOC3; (+) strand; PAM type: YTN; PAM sequence: TTT
ctttctctttctatttcttt

SEQ ID NO: 13270 - DNA, 20 bp, Artificial Sequence
  Description of Artificial Sequence: Synthetic oligonucleotide
  Target: APOC3; (+) strand; PAM type: YTN; PAM sequence: TTC
tttctctttctatttctttc

SEQ ID NO: 13271 - DNA, 20 bp, Artificial Sequence
  Description of Artificial Sequence: Synthetic oligonucleotide
  Target: APOC3; (+) strand; PAM type: YTN; PAM sequence: CTT
tctctttctatttctttctt

SEQ ID NO: 13272 - DNA, 20 bp, Artificial Sequence
  Description of Artificial Sequence: Synthetic oligonucleotide
  Target: APOC3; (+) strand; PAM type: YTN; PAM sequence: TTT
ctctttctatttctttcttt

SEQ ID NO: 13273 - DNA, 20 bp, Artificial Sequence
  Description of Artificial Sequence: Synthetic oligonucleotide
  Target: APOC3; (+) strand; PAM type: YTN; PAM sequence: TTC
tctttctatttctttctttc

SEQ ID NO: 13274 - DNA, 20 bp, Artificial Sequence
  Description of Artificial Sequence: Synthetic oligonucleotide
  Target: APOC3; (+) strand; PAM type: YTN; PAM sequence: CTC
tttctatttctttctttctt

SEQ ID NO: 13275 - DNA, 20 bp, Artificial Sequence
  Description of Artificial Sequence: Synthetic oligonucleotide
  Target: APOC3; (+) strand; PAM type: YTN; PAM sequence: CTT
tctatttctttctttctttc

SEQ ID NO: 13276 - DNA, 20 bp, Artificial Sequence
  Description of Artificial Sequence: Synthetic oligonucleotide
  Target: APOC3; (+) strand; PAM type: YTN; PAM sequence: TTT
ctatttctttctttctttct

SEQ ID NO: 13277 - DNA, 20 bp, Artificial Sequence
  Description of Artificial Sequence: Synthetic oligonucleotide
  Target: APOC3; (+) strand; PAM type: YTN; PAM sequence: TTC
tatttctttctttctttctt

SEQ ID NO: 13278 - DNA, 20 bp, Artificial Sequence
  Description of Artificial Sequence: Synthetic oligonucleotide
  Target: APOC3; (+) strand; PAM type: YTN; PAM sequence: CTA
tttctttctttctttctttc

SEQ ID NO: 13279 - DNA, 20 bp, Artificial Sequence
  Description of Artificial Sequence: Synthetic oligonucleotide
  Target: APOC3; (+) strand; PAM type: YTN; PAM sequence: TTT
ctttctttctttctttcttt

SEQ ID NO: 13280 - DNA, 20 bp, Artificial Sequence
  Description of Artificial Sequence: Synthetic oligonucleotide
  Target: APOC3; (+) strand; PAM type: YTN; PAM sequence: TTC
tttctttctttctttctttc

SEQ ID NO: 13281 - DNA, 20 bp, Artificial Sequence
  Description of Artificial Sequence: Synthetic oligonucleotide
  Target: APOC3; (+) strand; PAM type: YTN; PAM sequence: CTT
tctttctttctttctttctt

SEQ ID NO: 13282 - DNA, 20 bp, Artificial Sequence
  Description of Artificial Sequence: Synthetic oligonucleotide
  Target: APOC3; (+) strand; PAM type: YTN; PAM sequence: TTT
ctttctttctttctttcttt

SEQ ID NO: 13283 - DNA, 20 bp, Artificial Sequence
  Description of Artificial Sequence: Synthetic oligonucleotide
  Target: APOC3; (+) strand; PAM type: YTN; PAM sequence: TTC
tttctttctttctttctttc

SEQ ID NO: 13284 - DNA, 20 bp, Artificial Sequence
  Description of Artificial Sequence: Synthetic oligonucleotide
  Target: APOC3; (+) strand; PAM type: YTN; PAM sequence: CTT
tctttctttctttctttctt

SEQ ID NO: 13285 - DNA, 20 bp, Artificial Sequence
  Description of Artificial Sequence: Synthetic oligonucleotide
  Target: APOC3; (+) strand; PAM type: YTN; PAM sequence: TTT
ctttctttctttctttcttt

SEQ ID NO: 13286 - DNA, 20 bp, Artificial Sequence
  Description of Artificial Sequence: Synthetic oligonucleotide
  Target: APOC3; (+) strand; PAM type: YTN; PAM sequence: TTC
tttctttctttctttctttc

SEQ ID NO: 13287 - DNA, 20 bp, Artificial Sequence
  Description of Artificial Sequence: Synthetic oligonucleotide
  Target: APOC3; (+) strand; PAM type: YTN; PAM sequence: CTT
tctttctttctttctttctt

SEQ ID NO: 13288 - DNA, 20 bp, Artificial Sequence
  Description of Artificial Sequence: Synthetic oligonucleotide
  Target: APOC3; (+) strand; PAM type: YTN; PAM sequence: TTT
ctttctttctttctttcttt

SEQ ID NO: 13289 - DNA, 20 bp, Artificial Sequence
  Description of Artificial Sequence: Synthetic oligonucleotide
  Target: APOC3; (+) strand; PAM type: YTN; PAM sequence: TTC
tttctttctttctttctttc

SEQ ID NO: 13290 - DNA, 20 bp, Artificial Sequence
  Description of Artificial Sequence: Synthetic oligonucleotide
  Target: APOC3; (+) strand; PAM type: YTN; PAM sequence: CTT
tctttctttctttctttctt

SEQ ID NO: 13291 - DNA, 20 bp, Artificial Sequence
  Description of Artificial Sequence: Synthetic oligonucleotide
  Target: APOC3; (+) strand; PAM type: YTN; PAM sequence: TTT
ctttctttctttctttcttt

SEQ ID NO: 13292 - DNA, 20 bp, Artificial Sequence
  Description of Artificial Sequence: Synthetic oligonucleotide
  Target: APOC3; (+) strand; PAM type: YTN; PAM sequence: TTC
tttctttctttctttctttc

SEQ ID NO: 13293 - DNA, 20 bp, Artificial Sequence
  Description of Artificial Sequence: Synthetic oligonucleotide
  Target: APOC3; (+) strand; PAM type: YTN; PAM sequence: CTT
tctttctttctttctttctt

SEQ ID NO: 13294 - DNA, 20 bp, Artificial Sequence
  Description of Artificial Sequence: Synthetic oligonucleotide
  Target: APOC3; (+) strand; PAM type: YTN; PAM sequence: TTT
ctttctttctttctttcttt

SEQ ID NO: 13295 - DNA, 20 bp, Artificial Sequence
  Description of Artificial Sequence: Synthetic oligonucleotide
  Target: APOC3; (+) strand; PAM type: YTN; PAM sequence: TTC
tttctttctttctttctttc

SEQ ID NO: 13296 - DNA, 20 bp, Artificial Sequence
  Description of Artificial Sequence: Synthetic oligonucleotide
  Target: APOC3; (+) strand; PAM type: YTN; PAM sequence: CTT
tctttctttctttctttctt

SEQ ID NO: 13297 - DNA, 20 bp, Artificial Sequence
  Description of Artificial Sequence: Synthetic oligonucleotide
  Target: APOC3; (+) strand; PAM type: YTN; PAM sequence: TTT
ctttctttctttctttcttt

SEQ ID NO: 13298 - DNA, 20 bp, Artificial Sequence
  Description of Artificial Sequence: Synthetic oligonucleotide
  Target: APOC3; (+) strand; PAM type: YTN; PAM sequence: TTC
tttctttctttctttctttc

SEQ ID NO: 13299 - DNA, 20 bp, Artificial Sequence
  Description of Artificial Sequence: Synthetic oligonucleotide
  Target: APOC3; (+) strand; PAM type: YTN; PAM sequence: CTT
tctttctttctttctttctt

SEQ ID NO: 13300 - DNA, 20 bp, Artificial Sequence
  Description of Artificial Sequence: Synthetic oligonucleotide
  Target: APOC3; (+) strand; PAM type: YTN; PAM sequence: TTT
ctttctttctttctttcttt

SEQ ID NO: 13301 - DNA, 20 bp, Artificial Sequence
  Description of Artificial Sequence: Synthetic oligonucleotide
  Target: APOC3; (+) strand; PAM type: YTN; PAM sequence: TTC
tttctttctttctttctttc

SEQ ID NO: 13302 - DNA, 20 bp, Artificial Sequence
  Description of Artificial Sequence: Synthetic oligonucleotide
  Target: APOC3; (+) strand; PAM type: YTN; PAM sequence: CTT
tctttctttctttctttctt

SEQ ID NO: 13303 - DNA, 20 bp, Artificial Sequence
  Description of Artificial Sequence: Synthetic oligonucleotide
  Target: APOC3; (+) strand; PAM type: YTN; PAM sequence: TTT
ctttctttctttctttcttt

SEQ ID NO: 13304 - DNA, 20 bp, Artificial Sequence
  Description of Artificial Sequence: Synthetic oligonucleotide
  Target: APOC3; (+) strand; PAM type: YTN; PAM sequence: TTC
tttctttctttctttctttc

SEQ ID NO: 13305 - DNA, 20 bp, Artificial Sequence
  Description of Artificial Sequence: Synthetic oligonucleotide
  Target: APOC3; (+) strand; PAM type: YTN; PAM sequence: CTT
tctttctttctttctttctt

SEQ ID NO: 13306 - DNA, 20 bp, Artificial Sequence
  Description of Artificial Sequence: Synthetic oligonucleotide
  Target: APOC3; (+) strand; PAM type: YTN; PAM sequence: TTT
ctttctttctttctttcttt

SEQ ID NO: 13307 - DNA, 20 bp, Artificial Sequence
  Description of Artificial Sequence: Synthetic oligonucleotide
  Target: APOC3; (+) strand; PAM type: YTN; PAM sequence: TTC
tttctttctttctttctttc

SEQ ID NO: 13308 - DNA, 20 bp, Artificial Sequence
  Description of Artificial Sequence: Synthetic oligonucleotide
  Target: APOC3; (+) strand; PAM type: YTN; PAM sequence: CTT
tctttctttctttctttctt

SEQ ID NO: 13309 - DNA, 20 bp, Artificial Sequence
  Description of Artificial Sequence: Synthetic oligonucleotide
  Target: APOC3; (+) strand; PAM type: YTN; PAM sequence: TTT
ctttctttctttctttcttt

SEQ ID NO: 13310 - DNA, 20 bp, Artificial Sequence
  Description of Artificial Sequence: Synthetic oligonucleotide
  Target: APOC3; (+) strand; PAM type: YTN; PAM sequence: TTC
tttctttctttctttctttc

SEQ ID NO: 13311 - DNA, 20 bp, Artificial Sequence
  Description of Artificial Sequence: Synthetic oligonucleotide
  Target: APOC3; (+) strand; PAM type: YTN; PAM sequence: CTT
tctttctttctttctttctt

SEQ ID NO: 13312 - DNA, 20 bp, Artificial Sequence
  Description of Artificial Sequence: Synthetic oligonucleotide
  Target: APOC3; (+) strand; PAM type: YTN; PAM sequence: TTT
ctttctttctttctttcttt

SEQ ID NO: 13313 - DNA, 20 bp, Artificial Sequence
  Description of Artificial Sequence: Synthetic oligonucleotide
  Target: APOC3; (+) strand; PAM type: YTN; PAM sequence: TTC
tttctttctttctttctttc

SEQ ID NO: 13314 - DNA, 20 bp, Artificial Sequence
  Description of Artificial Sequence: Synthetic oligonucleotide
  Target: APOC3; (+) strand; PAM type: YTN; PAM sequence: CTT
tctttctttctttctttcct

SEQ ID NO: 13315 - DNA, 20 bp, Artificial Sequence
  Description of Artificial Sequence: Synthetic oligonucleotide
  Target: APOC3; (+) strand; PAM type: YTN; PAM sequence: TTT
ctttctttctttctttcctt

SEQ ID NO: 13316 - DNA, 20 bp, Artificial Sequence
  Description of Artificial Sequence: Synthetic oligonucleotide
  Target: APOC3; (+) strand; PAM type: YTN; PAM sequence: TTC
tttctttctttctttccttt

SEQ ID NO: 13317 - DNA, 20 bp, Artificial Sequence
  Description of Artificial Sequence: Synthetic oligonucleotide
  Target: APOC3; (+) strand; PAM type: YTN; PAM sequence: CTT
tctttctttctttcctttct

SEQ ID NO: 13318 - DNA, 20 bp, Artificial Sequence
  Description of Artificial Sequence: Synthetic oligonucleotide
  Target: APOC3; (+) strand; PAM type: YTN; PAM sequence: TTT
ctttctttctttcctttctt

SEQ ID NO: 13319 - DNA, 20 bp, Artificial Sequence
  Description of Artificial Sequence: Synthetic oligonucleotide
  Target: APOC3; (+) strand; PAM type: YTN; PAM sequence: TTC
tttctttctttcctttcttt

SEQ ID NO: 13320 - DNA, 20 bp, Artificial Sequence
  Description of Artificial Sequence: Synthetic oligonucleotide
  Target: APOC3; (+) strand; PAM type: YTN; PAM sequence: CTT
tctttctttcctttctttct

SEQ ID NO: 13321 - DNA, 20 bp, Artificial Sequence
  Description of Artificial Sequence: Synthetic oligonucleotide
  Target: APOC3; (+) strand; PAM type: YTN; PAM sequence: TTT
ctttctttcctttctttctt

SEQ ID NO: 13322 - DNA, 20 bp, Artificial Sequence
  Description of Artificial Sequence: Synthetic oligonucleotide
  Target: APOC3; (+) strand; PAM type: YTN; PAM sequence: TTC
tttctttcctttctttcttt

SEQ ID NO: 13323 - DNA, 20 bp, Artificial Sequence
  Description of Artificial Sequence: Synthetic oligonucleotide
  Target: APOC3; (+) strand; PAM type: YTN; PAM sequence: CTT
tctttcctttctttctttcc

SEQ ID NO: 13324 - DNA, 20 bp, Artificial Sequence
  Description of Artificial Sequence: Synthetic oligonucleotide
  Target: APOC3; (+) strand; PAM type: YTN; PAM sequence: TTT
ctttcctttctttctttcct

SEQ ID NO: 13325 - DNA, 20 bp, Artificial Sequence
  Description of Artificial Sequence: Synthetic oligonucleotide
  Target: APOC3; (+) strand; PAM type: YTN; PAM sequence: TTC
tttcctttctttctttcctt

SEQ ID NO: 13326 - DNA, 20 bp, Artificial Sequence
  Description of Artificial Sequence: Synthetic oligonucleotide
  Target: APOC3; (+) strand; PAM type: YTN; PAM sequence: CTT
tcctttctttctttcctttc

SEQ ID NO: 13327 - DNA, 20 bp, Artificial Sequence
  Description of Artificial Sequence: Synthetic oligonucleotide
  Target: APOC3; (+) strand; PAM type: YTN; PAM sequence: TTT
cctttctttctttcctttct

SEQ ID NO: 13328 - DNA, 20 bp, Artificial Sequence
  Description of Artificial Sequence: Synthetic oligonucleotide
  Target: APOC3; (+) strand; PAM type: YTN; PAM sequence: TTC
ctttctttctttcctttctt

SEQ ID NO: 13329 - DNA, 20 bp, Artificial Sequence
  Description of Artificial Sequence: Synthetic oligonucleotide
  Target: APOC3; (+) strand; PAM type: YTN; PAM sequence: CTT
tctttctttcctttctttct

SEQ ID NO: 13330 - DNA, 20 bp, Artificial Sequence
  Description of Artificial Sequence: Synthetic oligonucleotide
  Target: APOC3; (+) strand; PAM type: YTN; PAM sequence: TTT
ctttctttcctttctttctt

SEQ ID NO: 13331 - DNA, 20 bp, Artificial Sequence
  Description of Artificial Sequence: Synthetic oligonucleotide
  Target: APOC3; (+) strand; PAM type: YTN; PAM sequence: TTC
tttctttcctttctttcttt

SEQ ID NO: 13332 - DNA, 20 bp, Artificial Sequence
  Description of Artificial Sequence: Synthetic oligonucleotide
  Target: APOC3; (+) strand; PAM type: YTN; PAM sequence: CTT
tctttcctttctttctttcc

SEQ ID NO: 13333 - DNA, 20 bp, Artificial Sequence
  Description of Artificial Sequence: Synthetic oligonucleotide
  Target: APOC3; (+) strand; PAM type: YTN; PAM sequence: TTT
ctttcctttctttctttcct

SEQ ID NO: 13334 - DNA, 20 bp, Artificial Sequence
  Description of Artificial Sequence: Synthetic oligonucleotide
  Target: APOC3; (+) strand; PAM type: YTN; PAM sequence: TTC
tttcctttctttctttcctt

SEQ ID NO: 13335 - DNA, 20 bp, Artificial Sequence
  Description of Artificial Sequence: Synthetic oligonucleotide
  Target: APOC3; (+) strand; PAM type: YTN; PAM sequence: CTT
tcctttctttctttcctttc

SEQ ID NO: 13336 - DNA, 20 bp, Artificial Sequence
  Description of Artificial Sequence: Synthetic oligonucleotide
  Target: APOC3; (+) strand; PAM type: YTN; PAM sequence: TTT
cctttctttctttcctttct

SEQ ID NO: 13337 - DNA, 20 bp, Artificial Sequence
  Description of Artificial Sequence: Synthetic oligonucleotide
  Target: APOC3; (+) strand; PAM type: YTN; PAM sequence: TTC
ctttctttctttcctttctt

SEQ ID NO: 13338 - DNA, 20 bp, Artificial Sequence
  Description of Artificial Sequence: Synthetic oligonucleotide
  Target: APOC3; (+) strand; PAM type: YTN; PAM sequence: CTT
tctttctttcctttctttct

SEQ ID NO: 13339 - DNA, 20 bp, Artificial Sequence
  Description of Artificial Sequence: Synthetic oligonucleotide
  Target: APOC3; (+) strand; PAM type: YTN; PAM sequence: TTT
ctttctttcctttctttctt

SEQ ID NO: 13340 - DNA, 20 bp, Artificial Sequence
  Description of Artificial Sequence: Synthetic oligonucleotide
  Target: APOC3; (+) strand; PAM type: YTN; PAM sequence: TTC
tttctttcctttctttcttt

SEQ ID NO: 13341 - DNA, 20 bp, Artificial Sequence
  Description of Artificial Sequence: Synthetic oligonucleotide
  Target: APOC3; (+) strand; PAM type: YTN; PAM sequence: CTT
tctttcctttctttctttct

SEQ ID NO: 13342 - DNA, 20 bp, Artificial Sequence
  Description of Artificial Sequence: Synthetic oligonucleotide
  Target: APOC3; (+) strand; PAM type: YTN; PAM sequence: TTT
ctttcctttctttctttctt

SEQ ID NO: 13343 - DNA, 20 bp, Artificial Sequence
  Description of Artificial Sequence: Synthetic oligonucleotide
  Target: APOC3; (+) strand; PAM type: YTN; PAM sequence: TTC
tttcctttctttctttcttt

SEQ ID NO: 13344 - DNA, 20 bp, Artificial Sequence
  Description of Artificial Sequence: Synthetic oligonucleotide
  Target: APOC3; (+) strand; PAM type: YTN; PAM sequence: CTT
tcctttctttctttctttcc

SEQ ID NO: 13345 - DNA, 20 bp, Artificial Sequence
  Description of Artificial Sequence: Synthetic oligonucleotide
  Target: APOC3; (+) strand; PAM type: YTN; PAM sequence: TTT
cctttctttctttctttcct

SEQ ID NO: 13346 - DNA, 20 bp, Artificial Sequence
  Description of Artificial Sequence: Synthetic oligonucleotide
  Target: APOC3; (+) strand; PAM type: YTN; PAM sequence: TTC
ctttctttctttctttcctt

SEQ ID NO: 13347 - DNA, 20 bp, Artificial Sequence
  Description of Artificial Sequence: Synthetic oligonucleotide
  Target: APOC3; (+) strand; PAM type: YTN; PAM sequence: CTT
tctttctttctttcctttct

SEQ ID NO: 13348 - DNA, 20 bp, Artificial Sequence
  Description of Artificial Sequence: Synthetic oligonucleotide
  Target: APOC3; (+) strand; PAM type: YTN; PAM sequence: TTT
ctttctttctttcctttctt

SEQ ID NO: 13349 - DNA, 20 bp, Artificial Sequence
  Description of Artificial Sequence: Synthetic oligonucleotide
  Target: APOC3; (+) strand; PAM type: YTN; PAM sequence: TTC
tttctttctttcctttcttt

SEQ ID NO: 13350 - DNA, 20 bp, Artificial Sequence
  Description of Artificial Sequence: Synthetic oligonucleotide
  Target: APOC3; (+) strand; PAM type: YTN; PAM sequence: CTT
tctttctttcctttctttct

SEQ ID NO: 13351 - DNA, 20 bp, Artificial Sequence
  Description of Artificial Sequence: Synthetic oligonucleotide
  Target: APOC3; (+) strand; PAM type: YTN; PAM sequence: TTT
ctttctttcctttctttctc

SEQ ID NO: 13352 - DNA, 20 bp, Artificial Sequence
  Description of Artificial Sequence: Synthetic oligonucleotide
  Target: APOC3; (+) strand; PAM type: YTN; PAM sequence: TTC
tttctttcctttctttctct

SEQ ID NO: 13353 - DNA, 20 bp, Artificial Sequence
  Description of Artificial Sequence: Synthetic oligonucleotide
  Target: APOC3; (+) strand; PAM type: YTN; PAM sequence: CTT
tctttcctttctttctcttt

SEQ ID NO: 13354 - DNA, 20 bp, Artificial Sequence
  Description of Artificial Sequence: Synthetic oligonucleotide
  Target: APOC3; (+) strand; PAM type: YTN; PAM sequence: TTT
ctttcctttctttctctttc

SEQ ID NO: 13355 - DNA, 20 bp, Artificial Sequence
  Description of Artificial Sequence: Synthetic oligonucleotide
  Target: APOC3; (+) strand; PAM type: YTN; PAM sequence: TTC
tttcctttctttctctttct

SEQ ID NO: 13356 - DNA, 20 bp, Artificial Sequence
  Description of Artificial Sequence: Synthetic oligonucleotide
  Target: APOC3; (+) strand; PAM type: YTN; PAM sequence: CTT
tcctttctttctctttcttt

SEQ ID NO: 13357 - DNA, 20 bp, Artificial Sequence
  Description of Artificial Sequence: Synthetic oligonucleotide
  Target: APOC3; (+) strand; PAM type: YTN; PAM sequence: TTT
cctttctttctctttctttc

SEQ ID NO: 13358 - DNA, 20 bp, Artificial Sequence
  Description of Artificial Sequence: Synthetic oligonucleotide
  Target: APOC3; (+) strand; PAM type: YTN; PAM sequence: TTC
ctttctttctctttctttct

SEQ ID NO: 13359 - DNA, 20 bp, Artificial Sequence
  Description of Artificial Sequence: Synthetic oligonucleotide
  Target: APOC3; (+) strand; PAM type: YTN; PAM sequence: CTT
tctttctctttctttctttc

SEQ ID NO: 13360 - DNA, 20 bp, Artificial Sequence
  Description of Artificial Sequence: Synthetic oligonucleotide
  Target: APOC3; (+) strand; PAM type: YTN; PAM sequence: TTT
ctttctctttctttctttct

SEQ ID NO: 13361 - DNA, 20 bp, Artificial Sequence
  Description of Artificial Sequence: Synthetic oligonucleotide
  Target: APOC3; (+) strand; PAM type: YTN; PAM sequence: TTC
tttctctttctttctttctt

SEQ ID NO: 13362 - DNA, 20 bp, Artificial Sequence
  Description of Artificial Sequence: Synthetic oligonucleotide
  Target: APOC3; (+) strand; PAM type: YTN; PAM sequence: CTT
tctctttctttctttctttc

SEQ ID NO: 13363 - DNA, 20 bp, Artificial Sequence
  Description of Artificial Sequence: Synthetic oligonucleotide
  Target: APOC3; (+) strand; PAM type: YTN; PAM sequence: TTT
ctctttctttctttctttcc

SEQ ID NO: 13364 - DNA, 20 bp, Artificial Sequence
  Description of Artificial Sequence: Synthetic oligonucleotide
  Target: APOC3; (+) strand; PAM type: YTN; PAM sequence: TTC
tctttctttctttctttcct

SEQ ID NO: 13365 - DNA, 20 bp, Artificial Sequence
  Description of Artificial Sequence: Synthetic oligonucleotide
  Target: APOC3; (+) strand; PAM type: YTN; PAM sequence: CTC
tttctttctttctttccttt

SEQ ID NO: 13366 - DNA, 20 bp, Artificial Sequence
  Description of Artificial Sequence: Synthetic oligonucleotide
  Target: APOC3; (+) strand; PAM type: YTN; PAM sequence: CTT
tctttctttctttccttttt

SEQ ID NO: 13367 - DNA, 20 bp, Artificial Sequence
  Description of Artificial Sequence: Synthetic oligonucleotide
  Target: APOC3; (+) strand; PAM type: YTN; PAM sequence: TTT
ctttctttctttcctttttc

SEQ ID NO: 13368 - DNA, 20 bp, Artificial Sequence
  Description of Artificial Sequence: Synthetic oligonucleotide
  Target: APOC3; (+) strand; PAM type: YTN; PAM sequence: TTC
tttctttctttcctttttct

SEQ ID NO: 13369 - DNA, 20 bp, Artificial Sequence
  Description of Artificial Sequence: Synthetic oligonucleotide
  Target: APOC3; (+) strand; PAM type: YTN; PAM sequence: CTT
tctttctttcctttttcttt

SEQ ID NO: 13370 - DNA, 20 bp, Artificial Sequence
  Description of Artificial Sequence: Synthetic oligonucleotide
  Target: APOC3; (+) strand; PAM type: YTN; PAM sequence: TTT
ctttctttcctttttctttc

SEQ ID NO: 13371 - DNA, 20 bp, Artificial Sequence
  Description of Artificial Sequence: Synthetic oligonucleotide
  Target: APOC3; (+) strand; PAM type: YTN; PAM sequence: TTC
tttctttcctttttctttct

SEQ ID NO: 13372 - DNA, 20 bp, Artificial Sequence
  Description of Artificial Sequence: Synthetic oligonucleotide
  Target: APOC3; (+) strand; PAM type: YTN; PAM sequence: CTT
tctttcctttttctttcttt

SEQ ID NO: 13373 - DNA, 20 bp, Artificial Sequence
  Description of Artificial Sequence: Synthetic oligonucleotide
  Target: APOC3; (+) strand; PAM type: YTN; PAM sequence: TTT
ctttcctttttctttctttc

SEQ ID NO: 13374 - DNA, 20 bp, Artificial Sequence
  Description of Artificial Sequence: Synthetic oligonucleotide
  Target: APOC3; (+) strand; PAM type: YTN; PAM sequence: TTC
tttcctttttctttctttcc

SEQ ID NO: 13375 - DNA, 20 bp, Artificial Sequence
  Description of Artificial Sequence: Synthetic oligonucleotide
  Target: APOC3; (+) strand; PAM type: YTN; PAM sequence: CTT
tcctttttctttctttccct

SEQ ID NO: 13376 - DNA, 20 bp, Artificial Sequence
  Description of Artificial Sequence: Synthetic oligonucleotide
  Target: APOC3; (+) strand; PAM type: YTN; PAM sequence: TTT
cctttttctttctttccctc

SEQ ID NO: 13377 - DNA, 20 bp, Artificial Sequence
  Description of Artificial Sequence: Synthetic oligonucleotide
  Target: APOC3; (+) strand; PAM type: YTN; PAM sequence: TTC
ctttttctttctttccctct

SEQ ID NO: 13378 - DNA, 20 bp, Artificial Sequence
  Description of Artificial Sequence: Synthetic oligonucleotide
  Target: APOC3; (+) strand; PAM type: YTN; PAM sequence: CTT
tttctttctttccctctctt

SEQ ID NO: 13379 - DNA, 20 bp, Artificial Sequence
  Description of Artificial Sequence: Synthetic oligonucleotide
  Target: APOC3; (+) strand; PAM type: YTN; PAM sequence: TTT
ttctttctttccctctcttc

SEQ ID NO: 13380 - DNA, 20 bp, Artificial Sequence
  Description of Artificial Sequence: Synthetic oligonucleotide
  Target: APOC3; (+) strand; PAM type: YTN; PAM sequence: TTT
tctttctttccctctcttcc

SEQ ID NO: 13381 - DNA, 20 bp, Artificial Sequence
  Description of Artificial Sequence: Synthetic oligonucleotide
  Target: APOC3; (+) strand; PAM type: YTN; PAM sequence: TTT
ctttctttccctctcttcct

SEQ ID NO: 13382 - DNA, 20 bp, Artificial Sequence
  Description of Artificial Sequence: Synthetic oligonucleotide
  Target: APOC3; (+) strand; PAM type: YTN; PAM sequence: TTC
tttctttccctctcttcctt

SEQ ID NO: 13383 - DNA, 20 bp, Artificial Sequence
  Description of Artificial Sequence: Synthetic oligonucleotide
  Target: APOC3; (+) strand; PAM type: YTN; PAM sequence: CTT
tctttccctctcttcctttc

SEQ ID NO: 13384 - DNA, 20 bp, Artificial Sequence
  Description of Artificial Sequence: Synthetic oligonucleotide
  Target: APOC3; (+) strand; PAM type: YTN; PAM sequence: TTT
ctttccctctcttcctttct

SEQ ID NO: 13385 - DNA, 20 bp, Artificial Sequence
  Description of Artificial Sequence: Synthetic oligonucleotide
  Target: APOC3; (+) strand; PAM type: YTN; PAM sequence: TTC
tttccctctcttcctttctc

SEQ ID NO: 13386 - DNA, 20 bp, Artificial Sequence
  Description of Artificial Sequence: Synthetic oligonucleotide
  Target: APOC3; (+) strand; PAM type: YTN; PAM sequence: CTT
tccctctcttcctttctctc

SEQ ID NO: 13387 - DNA, 20 bp, Artificial Sequence
  Description of Artificial Sequence: Synthetic oligonucleotide
  Target: APOC3; (+) strand; PAM type: YTN; PAM sequence: TTT
ccctctcttcctttctctct

SEQ ID NO: 13388 - DNA, 20 bp, Artificial Sequence
  Description of Artificial Sequence: Synthetic oligonucleotide
  Target: APOC3; (+) strand; PAM type: YTN; PAM sequence: TTC
cctctcttcctttctctctt

SEQ ID NO: 13389 - DNA, 20 bp, Artificial Sequence
  Description of Artificial Sequence: Synthetic oligonucleotide
  Target: APOC3; (+) strand; PAM type: YTN; PAM sequence: CTC
tcttcctttctctctttctt

SEQ ID NO: 13390 - DNA, 20 bp, Artificial Sequence
  Description of Artificial Sequence: Synthetic oligonucleotide
  Target: APOC3; (+) strand; PAM type: YTN; PAM sequence: CTC
ttcctttctctctttctttc

SEQ ID NO: 13391 - DNA, 20 bp, Artificial Sequence
  Description of Artificial Sequence: Synthetic oligonucleotide
  Target: APOC3; (+) strand; PAM type: YTN; PAM sequence: CTT
cctttctctctttctttctt

SEQ ID NO: 13392 - DNA, 20 bp, Artificial Sequence
  Description of Artificial Sequence: Synthetic oligonucleotide
  Target: APOC3; (+) strand; PAM type: YTN; PAM sequence: TTC
ctttctctctttctttcttc

SEQ ID NO: 13393 - DNA, 20 bp, Artificial Sequence
  Description of Artificial Sequence: Synthetic oligonucleotide
  Target: APOC3; (+) strand; PAM type: YTN; PAM sequence: CTT
tctctctttctttcttcttc

SEQ ID NO: 13394 - DNA, 20 bp, Artificial Sequence
  Description of Artificial Sequence: Synthetic oligonucleotide
  Target: APOC3; (+) strand; PAM type: YTN; PAM sequence: TTT
ctctctttctttcttcttct

SEQ ID NO: 13395 - DNA, 20 bp, Artificial Sequence
  Description of Artificial Sequence: Synthetic oligonucleotide
  Target: APOC3; (+) strand; PAM type: YTN; PAM sequence: TTC
tctctttctttcttcttctt

SEQ ID NO: 13396 - DNA, 20 bp, Artificial Sequence
  Description of Artificial Sequence: Synthetic oligonucleotide
  Target: APOC3; (+) strand; PAM type: YTN; PAM sequence: CTC
tctttctttcttcttctttt

SEQ ID NO: 13397 - DNA, 20 bp, Artificial Sequence
  Description of Artificial Sequence: Synthetic oligonucleotide
  Target: APOC3; (+) strand; PAM type: YTN; PAM sequence: CTC
tttctttcttcttctttttt

SEQ ID NO: 13398 - DNA, 20 bp, Artificial Sequence
  Description of Artificial Sequence: Synthetic oligonucleotide
  Target: APOC3; (+) strand; PAM type: YTN; PAM sequence: CTT
tctttcttcttctttttttt

SEQ ID NO: 13399 - DNA, 20 bp, Artificial Sequence
  Description of Artificial Sequence: Synthetic oligonucleotide
  Target: APOC3; (+) strand; PAM type: YTN; PAM sequence: TTT
ctttcttcttcttttttttt

SEQ ID NO: 13400 - DNA, 20 bp, Artificial Sequence
  Description of Artificial Sequence: Synthetic oligonucleotide
  Target: APOC3; (+) strand; PAM type: YTN; PAM sequence: TTC
tttcttcttctttttttttt

SEQ ID NO: 13401 - DNA, 20 bp, Artificial Sequence
  Description of Artificial Sequence: Synthetic oligonucleotide
  Target: APOC3; (+) strand; PAM type: YTN; PAM sequence: CTT
tcttcttcttttttttttaa

SEQ ID NO: 13402 - DNA, 20 bp, Artificial Sequence
  Description of Artificial Sequence: Synthetic oligonucleotide
  Target: APOC3; (+) strand; PAM type: YTN; PAM sequence: TTT
cttcttcttttttttttaat

SEQ ID NO: 13403 - DNA, 20 bp, Artificial Sequence
  Description of Artificial Sequence: Synthetic oligonucleotide
  Target: APOC3; (+) strand; PAM type: YTN; PAM sequence: TTC
ttcttcttttttttttaatg

SEQ ID NO: 13404 - DNA, 20 bp, Artificial Sequence
  Description of Artificial Sequence: Synthetic oligonucleotide
  Target: APOC3; (+) strand; PAM type: YTN; PAM sequence: CTT
cttcttttttttttaatgga

SEQ ID NO: 13405 - DNA, 20 bp, Artificial Sequence
  Description of Artificial Sequence: Synthetic oligonucleotide
  Target: APOC3; (+) strand; PAM type: YTN; PAM sequence: TTC
ttcttttttttttaatggag

SEQ ID NO: 13406 - DNA, 20 bp, Artificial Sequence
  Description of Artificial Sequence: Synthetic oligonucleotide
  Target: APOC3; (+) strand; PAM type: YTN; PAM sequence: CTT
cttttttttttaatggagtc

SEQ ID NO: 13407 - DNA, 20 bp, Artificial Sequence
  Description of Artificial Sequence: Synthetic oligonucleotide
  Target: APOC3; (+) strand; PAM type: YTN; PAM sequence: TTC
ttttttttttaatggagtct

SEQ ID NO: 13408 - DNA, 20 bp, Artificial Sequence
  Description of Artificial Sequence: Synthetic oligonucleotide
  Target: APOC3; (+) strand; PAM type: YTN; PAM sequence: CTT
ttttttttaatggagtctcc

SEQ ID NO: 13409 - DNA, 20 bp, Artificial Sequence
  Description of Artificial Sequence: Synthetic oligonucleotide
  Target: APOC3; (+) strand; PAM type: YTN; PAM sequence: TTT
tttttttaatggagtctccc

SEQ ID NO: 13410 - DNA, 20 bp, Artificial Sequence
  Description of Artificial Sequence: Synthetic oligonucleotide
  Target: APOC3; (+) strand; PAM type: YTN; PAM sequence: TTT
ttttttaatggagtctccct

SEQ ID NO: 13411 - DNA, 20 bp, Artificial Sequence
  Description of Artificial Sequence: Synthetic oligonucleotide
  Target: APOC3; (+) strand; PAM type: YTN; PAM sequence: TTT
tttttaatggagtctccctc

SEQ ID NO: 13412 - DNA, 20 bp, Artificial Sequence
  Description of Artificial Sequence: Synthetic oligonucleotide
  Target: APOC3; (+) strand; PAM type: YTN; PAM sequence: TTT
ttttaatggagtctccctct

SEQ ID NO: 13413 - DNA, 20 bp, Artificial Sequence
  Description of Artificial Sequence: Synthetic oligonucleotide
  Target: APOC3; (+) strand; PAM type: YTN; PAM sequence: TTT
tttaatggagtctccctctg

SEQ ID NO: 13414 - DNA, 20 bp, Artificial Sequence
  Description of Artificial Sequence: Synthetic oligonucleotide
  Target: APOC3; (+) strand; PAM type: YTN; PAM sequence: TTT
ttaatggagtctccctctgt

SEQ ID NO: 13415 - DNA, 20 bp, Artificial Sequence
  Description of Artificial Sequence: Synthetic oligonucleotide
  Target: APOC3; (+) strand; PAM type: YTN; PAM sequence: TTT
taatggagtctccctctgtc

SEQ ID NO: 13416 - DNA, 20 bp, Artificial Sequence
  Description of Artificial Sequence: Synthetic oligonucleotide
  Target: APOC3; (+) strand; PAM type: YTN; PAM sequence: TTT
aatggagtctccctctgtca

SEQ ID NO: 13417 - DNA, 20 bp, Artificial Sequence
  Description of Artificial Sequence: Synthetic oligonucleotide
  Target: APOC3; (+) strand; PAM type: YTN; PAM sequence: TTA
atggagtctccctctgtcac

SEQ ID NO: 13418 - DNA, 20 bp, Artificial Sequence
  Description of Artificial Sequence: Synthetic oligonucleotide
  Target: APOC3; (+) strand; PAM type: YTN; PAM sequence: CTC
cctctgtcacctaggctgga

SEQ ID NO: 13419 - DNA, 20 bp, Artificial Sequence
  Description of Artificial Sequence: Synthetic oligonucleotide
  Target: APOC3; (+) strand; PAM type: YTN; PAM sequence: CTC
tgtcacctaggctggagtgc

SEQ ID NO: 13420 - DNA, 20 bp, Artificial Sequence
  Description of Artificial Sequence: Synthetic oligonucleotide
  Target: APOC3; (+) strand; PAM type: YTN; PAM sequence: CTG
tcacctaggctggagtgcag

SEQ ID NO: 13421 - DNA, 20 bp, Artificial Sequence
  Description of Artificial Sequence: Synthetic oligonucleotide
  Target: APOC3; (+) strand; PAM type: YTN; PAM sequence: CTA
ggctggagtgcagtggtgcc

SEQ ID NO: 13422 - DNA, 20 bp, Artificial Sequence
  Description of Artificial Sequence: Synthetic oligonucleotide
  Target: APOC3; (+) strand; PAM type: YTN; PAM sequence: CTG
gagtgcagtggtgccatctc

SEQ ID NO: 13423 - DNA, 20 bp, Artificial Sequence
  Description of Artificial Sequence: Synthetic oligonucleotide
  Target: APOC3; (+) strand; PAM type: YTN; PAM sequence: CTC
ggctcactgcaacctccgtc

SEQ ID NO: 13424 - DNA, 20 bp, Artificial Sequence
  Description of Artificial Sequence: Synthetic oligonucleotide
  Target: APOC3; (+) strand; PAM type: YTN; PAM sequence: CTC
actgcaacctccgtctcccg

SEQ ID NO: 13425 - DNA, 20 bp, Artificial Sequence
  Description of Artificial Sequence: Synthetic oligonucleotide
  Target: APOC3; (+) strand; PAM type: YTN; PAM sequence: CTG
caacctccgtctcccgggtt

SEQ ID NO: 13426 - DNA, 20 bp, Artificial Sequence
  Description of Artificial Sequence: Synthetic oligonucleotide
  Target: APOC3; (+) strand; PAM type: YTN; PAM sequence: CTC
cgtctcccgggttcaaccca

SEQ ID NO: 13427 - DNA, 20 bp, Artificial Sequence
  Description of Artificial Sequence: Synthetic oligonucleotide
  Target: APOC3; (+) strand; PAM type: YTN; PAM sequence: CTC
ccgggttcaacccattctcc

SEQ ID NO: 13428 - DNA, 20 bp, Artificial Sequence
  Description of Artificial Sequence: Synthetic oligonucleotide
  Target: APOC3; (+) strand; PAM type: YTN; PAM sequence: TTC
aacccattctcctgcctcag

SEQ ID NO: 13429 - DNA, 20 bp, Artificial Sequence
  Description of Artificial Sequence: Synthetic oligonucleotide
  Target: APOC3; (+) strand; PAM type: YTN; PAM sequence: TTC
tcctgcctcagcctcccaag

SEQ ID NO: 13430 - DNA, 20 bp, Artificial Sequence
  Description of Artificial Sequence: Synthetic oligonucleotide
  Target: APOC3; (+) strand; PAM type: YTN; PAM sequence: CTC
ctgcctcagcctcccaagta

SEQ ID NO: 13431 - DNA, 20 bp, Artificial Sequence
  Description of Artificial Sequence: Synthetic oligonucleotide
  Target: APOC3; (+) strand; PAM type: YTN; PAM sequence: CTG
cctcagcctcccaagtagct

SEQ ID NO: 13432 - DNA, 20 bp, Artificial Sequence
  Description of Artificial Sequence: Synthetic oligonucleotide
  Target: APOC3; (+) strand; PAM type: YTN; PAM sequence: CTC
agcctcccaagtagctggga

SEQ ID NO: 13433 - DNA, 20 bp, Artificial Sequence
  Description of Artificial Sequence: Synthetic oligonucleotide
  Target: APOC3; (+) strand; PAM type: YTN; PAM sequence: CTC
ccaagtagctgggattacag

SEQ ID NO: 13434 - DNA, 20 bp, Artificial Sequence
  Description of Artificial Sequence: Synthetic oligonucleotide
  Target: APOC3; (+) strand; PAM type: YTN; PAM sequence: CTG
ggattacaggcacgcgccac

SEQ ID NO: 13435 - DNA, 20 bp, Artificial Sequence
  Description of Artificial Sequence: Synthetic oligonucleotide
  Target: APOC3; (+) strand; PAM type: YTN; PAM sequence: TTA
caggcacgcgccaccacacc

SEQ ID NO: 13436 - DNA, 20 bp, Artificial Sequence
  Description of Artificial Sequence: Synthetic oligonucleotide
  Target: APOC3; (+) strand; PAM type: YTN; PAM sequence: CTA
atttttgtatttttagcaga

SEQ ID NO: 13437 - DNA, 20 bp, Artificial Sequence
  Description of Artificial Sequence: Synthetic oligonucleotide
  Target: APOC3; (+) strand; PAM type: YTN; PAM sequence: TTT
ttgtatttttagcagagatg

SEQ ID NO: 13438 - DNA, 20 bp, Artificial Sequence
  Description of Artificial Sequence: Synthetic oligonucleotide
  Target: APOC3; (+) strand; PAM type: YTN; PAM sequence: TTT
tgtatttttagcagagatgg

SEQ ID NO: 13439 - DNA, 20 bp, Artificial Sequence
  Description of Artificial Sequence: Synthetic oligonucleotide
  Target: APOC3; (+) strand; PAM type: YTN; PAM sequence: TTT
gtatttttagcagagatggg

SEQ ID NO: 13440 - DNA, 20 bp, Artificial Sequence
  Description of Artificial Sequence: Synthetic oligonucleotide
  Target: APOC3; (+) strand; PAM type: YTN; PAM sequence: TTG
tatttttagcagagatgggg

SEQ ID NO: 13441 - DNA, 20 bp, Artificial Sequence
  Description of Artificial Sequence: Synthetic oligonucleotide
  Target: APOC3; (+) strand; PAM type: YTN; PAM sequence: TTT
ttagcagagatggggtttca

SEQ ID NO: 13442 - DNA, 20 bp, Artificial Sequence
  Description of Artificial Sequence: Synthetic oligonucleotide
  Target: APOC3; (+) strand; PAM type: YTN; PAM sequence: TTT
tagcagagatggggtttcac

SEQ ID NO: 13443 - DNA, 20 bp, Artificial Sequence
  Description of Artificial Sequence: Synthetic oligonucleotide
  Target: APOC3; (+) strand; PAM type: YTN; PAM sequence: TTT
agcagagatggggtttcacc

SEQ ID NO: 13444 - DNA, 20 bp, Artificial Sequence
  Description of Artificial Sequence: Synthetic oligonucleotide
  Target: APOC3; (+) strand; PAM type: YTN; PAM sequence: TTA
gcagagatggggtttcacca

SEQ ID NO: 13445 - DNA, 20 bp, Artificial Sequence
  Description of Artificial Sequence: Synthetic oligonucleotide
  Target: APOC3; (+) strand; PAM type: YTN; PAM sequence: TTT
caccatgttggccaggttgg

SEQ ID NO: 13446 - DNA, 20 bp, Artificial Sequence
  Description of Artificial Sequence: Synthetic oligonucleotide
  Target: APOC3; (+) strand; PAM type: YTN; PAM sequence: TTC
accatgttggccaggttggt

SEQ ID NO: 13447 - DNA, 20 bp, Artificial Sequence
  Description of Artificial Sequence: Synthetic oligonucleotide
  Target: APOC3; (+) strand; PAM type: YTN; PAM sequence: TTG
gccaggttggtcttgaattc

SEQ ID NO: 13448 - DNA, 20 bp, Artificial Sequence
  Description of Artificial Sequence: Synthetic oligonucleotide
  Target: APOC3; (+) strand; PAM type: YTN; PAM sequence: TTG
gtcttgaattcctgacctca

SEQ ID NO: 13449 - DNA, 20 bp, Artificial Sequence
  Description of Artificial Sequence: Synthetic oligonucleotide
  Target: APOC3; (+) strand; PAM type: YTN; PAM sequence: CTT
gaattcctgacctcagggga

SEQ ID NO: 13450 - DNA, 20 bp, Artificial Sequence
  Description of Artificial Sequence: Synthetic oligonucleotide
  Target: APOC3; (+) strand; PAM type: YTN; PAM sequence: TTG
aattcctgacctcaggggat

SEQ ID NO: 13451 - DNA, 20 bp, Artificial Sequence
  Description of Artificial Sequence: Synthetic oligonucleotide
  Target: APOC3; (+) strand; PAM type: YTN; PAM sequence: TTC
ctgacctcaggggatcctcc

SEQ ID NO: 13452 - DNA, 20 bp, Artificial Sequence
  Description of Artificial Sequence: Synthetic oligonucleotide
  Target: APOC3; (+) strand; PAM type: YTN; PAM sequence: CTG
acctcaggggatcctcctgc

SEQ ID NO: 13453 - DNA, 20 bp, Artificial Sequence
  Description of Artificial Sequence: Synthetic oligonucleotide
  Target: APOC3; (+) strand; PAM type: YTN; PAM sequence: CTC
aggggatcctcctgcctcgg

SEQ ID NO: 13454 - DNA, 20 bp, Artificial Sequence
  Description of Artificial Sequence: Synthetic oligonucleotide
  Target: APOC3; (+) strand; PAM type: YTN; PAM sequence: CTC
ctgcctcggcctcccaaagt

SEQ ID NO: 13455 - DNA, 20 bp, Artificial Sequence
  Description of Artificial Sequence: Synthetic oligonucleotide
  Target: APOC3; (+) strand; PAM type: YTN; PAM sequence: CTG
cctcggcctcccaaagtgct

SEQ ID NO: 13456 - DNA, 20 bp, Artificial Sequence
  Description of Artificial Sequence: Synthetic oligonucleotide
  Target: APOC3; (+) strand; PAM type: YTN; PAM sequence: CTC
ggcctcccaaagtgctggga

SEQ ID NO: 13457 - DNA, 20 bp, Artificial Sequence
  Description of Artificial Sequence: Synthetic oligonucleotide
  Target: APOC3; (+) strand; PAM type: YTN; PAM sequence: CTC
ccaaagtgctgggattacag

SEQ ID NO: 13458 - DNA, 20 bp, Artificial Sequence
  Description of Artificial Sequence: Synthetic oligonucleotide
  Target: APOC3; (+) strand; PAM type: YTN; PAM sequence: CTG
ggattacaggcatgagccac

SEQ ID NO: 13459 - DNA, 20 bp, Artificial Sequence
  Description of Artificial Sequence: Synthetic oligonucleotide
  Target: APOC3; (+) strand; PAM type: YTN; PAM sequence: TTA
caggcatgagccactgcgcc

SEQ ID NO: 13460 - DNA, 20 bp, Artificial Sequence
  Description of Artificial Sequence: Synthetic oligonucleotide
  Target: APOC3; (+) strand; PAM type: YTN; PAM sequence: CTG
cgcctggccccattttcctt

SEQ ID NO: 13461 - DNA, 20 bp, Artificial Sequence
  Description of Artificial Sequence: Synthetic oligonucleotide
  Target: APOC3; (+) strand; PAM type: YTN; PAM sequence: CTG
gccccattttccttttctga

SEQ ID NO: 13462 - DNA, 20 bp, Artificial Sequence
  Description of Artificial Sequence: Synthetic oligonucleotide
  Target: APOC3; (+) strand; PAM type: YTN; PAM sequence: TTT
tccttttctgaaggtctggc

SEQ ID NO: 13463 - DNA, 20 bp, Artificial Sequence
  Description of Artificial Sequence: Synthetic oligonucleotide
  Target: APOC3; (+) strand; PAM type: YTN; PAM sequence: TTT
ccttttctgaaggtctggct

SEQ ID NO: 13464 - DNA, 20 bp, Artificial Sequence
  Description of Artificial Sequence: Synthetic oligonucleotide
  Target: APOC3; (+) strand; PAM type: YTN; PAM sequence: TTC
cttttctgaaggtctggcta

SEQ ID NO: 13465 - DNA, 20 bp, Artificial Sequence
  Description of Artificial Sequence: Synthetic oligonucleotide
  Target: APOC3; (+) strand; PAM type: YTN; PAM sequence: CTT
ttctgaaggtctggctagag

SEQ ID NO: 13466 - DNA, 20 bp, Artificial Sequence
  Description of Artificial Sequence: Synthetic oligonucleotide
  Target: APOC3; (+) strand; PAM type: YTN; PAM sequence: TTT
tctgaaggtctggctagagc

SEQ ID NO: 13467 - DNA, 20 bp, Artificial Sequence
  Description of Artificial Sequence: Synthetic oligonucleotide
  Target: APOC3; (+) strand; PAM type: YTN; PAM sequence: TTT
ctgaaggtctggctagagca

SEQ ID NO: 13468 - DNA, 20 bp, Artificial Sequence
  Description of Artificial Sequence: Synthetic oligonucleotide
  Target: APOC3; (+) strand; PAM type: YTN; PAM sequence: TTC
tgaaggtctggctagagcag

SEQ ID NO: 13469 - DNA, 20 bp, Artificial Sequence
  Description of Artificial Sequence: Synthetic oligonucleotide
  Target: APOC3; (+) strand; PAM type: YTN; PAM sequence: CTG
aaggtctggctagagcagtg

SEQ ID NO: 13470 - DNA, 20 bp, Artificial Sequence
  Description of Artificial Sequence: Synthetic oligonucleotide
  Target: APOC3; (+) strand; PAM type: YTN; PAM sequence: CTG
gctagagcagtggtcctcag

SEQ ID NO: 13471 - DNA, 20 bp, Artificial Sequence
  Description of Artificial Sequence: Synthetic oligonucleotide
  Target: APOC3; (+) strand; PAM type: YTN; PAM sequence: CTA
gagcagtggtcctcagcctt

SEQ ID NO: 13472 - DNA, 20 bp, Artificial Sequence
  Description of Artificial Sequence: Synthetic oligonucleotide
  Target: APOC3; (+) strand; PAM type: YTN; PAM sequence: CTC
agcctttttggcaccaggga

SEQ ID NO: 13473 - DNA, 20 bp, Artificial Sequence
  Description of Artificial Sequence: Synthetic oligonucleotide
  Target: APOC3; (+) strand; PAM type: YTN; PAM sequence: CTT
tttggcaccagggaccagtt

SEQ ID NO: 13474 - DNA, 20 bp, Artificial Sequence
  Description of Artificial Sequence: Synthetic oligonucleotide
  Target: APOC3; (+) strand; PAM type: YTN; PAM sequence: TTT
ttggcaccagggaccagttt

SEQ ID NO: 13475 - DNA, 20 bp, Artificial Sequence
  Description of Artificial Sequence: Synthetic oligonucleotide
  Target: APOC3; (+) strand; PAM type: YTN; PAM sequence: TTT
tggcaccagggaccagtttt

SEQ ID NO: 13476 - DNA, 20 bp, Artificial Sequence
  Description of Artificial Sequence: Synthetic oligonucleotide
  Target: APOC3; (+) strand; PAM type: YTN; PAM sequence: TTT
ggcaccagggaccagttttg

SEQ ID NO: 13477 - DNA, 20 bp, Artificial Sequence
  Description of Artificial Sequence: Synthetic oligonucleotide
  Target: APOC3; (+) strand; PAM type: YTN; PAM sequence: TTG
gcaccagggaccagttttgt

SEQ ID NO: 13478 - DNA, 20 bp, Artificial Sequence
  Description of Artificial Sequence: Synthetic oligonucleotide
  Target: APOC3; (+) strand; PAM type: YTN; PAM sequence: TTT
tgtggtggacaatttttcca

SEQ ID NO: 13479 - DNA, 20 bp, Artificial Sequence
  Description of Artificial Sequence: Synthetic oligonucleotide
  Target: APOC3; (+) strand; PAM type: YTN; PAM sequence: TTT
gtggtggacaatttttccat

SEQ ID NO: 13480 - DNA, 20 bp, Artificial Sequence
  Description of Artificial Sequence: Synthetic oligonucleotide
  Target: APOC3; (+) strand; PAM type: YTN; PAM sequence: TTG
tggtggacaatttttccatg

SEQ ID NO: 13481 - DNA, 20 bp, Artificial Sequence
  Description of Artificial Sequence: Synthetic oligonucleotide
  Target: APOC3; (+) strand; PAM type: YTN; PAM sequence: TTT
ttccatgggccagcggggat

SEQ ID NO: 13482 - DNA, 20 bp, Artificial Sequence
  Description of Artificial Sequence: Synthetic oligonucleotide
  Target: APOC3; (+) strand; PAM type: YTN; PAM sequence: TTT
tccatgggccagcggggatg

SEQ ID NO: 13483 - DNA, 20 bp, Artificial Sequence
  Description of Artificial Sequence: Synthetic oligonucleotide
  Target: APOC3; (+) strand; PAM type: YTN; PAM sequence: TTT
ccatgggccagcggggatgg

SEQ ID NO: 13484 - DNA, 20 bp, Artificial Sequence
  Description of Artificial Sequence: Synthetic oligonucleotide
  Target: APOC3; (+) strand; PAM type: YTN; PAM sequence: TTC
catgggccagcggggatggt

SEQ ID NO: 13485 - DNA, 20 bp, Artificial Sequence
  Description of Artificial Sequence: Synthetic oligonucleotide
  Target: APOC3; (+) strand; PAM type: YTN; PAM sequence: TTT
tgggatgaagctgttccacc

SEQ ID NO: 13486 - DNA, 20 bp, Artificial Sequence
  Description of Artificial Sequence: Synthetic oligonucleotide
  Target: APOC3; (+) strand; PAM type: YTN; PAM sequence: TTT
gggatgaagctgttccacct

SEQ ID NO: 13487 - DNA, 20 bp, Artificial Sequence
  Description of Artificial Sequence: Synthetic oligonucleotide
  Target: APOC3; (+) strand; PAM type: YTN; PAM sequence: TTG
ggatgaagctgttccacctc

SEQ ID NO: 13488 - DNA, 20 bp, Artificial Sequence
  Description of Artificial Sequence: Synthetic oligonucleotide
  Target: APOC3; (+) strand; PAM type: YTN; PAM sequence: CTG
ttccacctcagatcatcagg

SEQ ID NO: 13489 - DNA, 20 bp, Artificial Sequence
  Description of Artificial Sequence: Synthetic oligonucleotide
  Target: APOC3; (+) strand; PAM type: YTN; PAM sequence: TTC
cacctcagatcatcaggcat

SEQ ID NO: 13490 - DNA, 20 bp, Artificial Sequence
  Description of Artificial Sequence: Synthetic oligonucleotide
  Target: APOC3; (+) strand; PAM type: YTN; PAM sequence: CTC
agatcatcaggcattagatt

SEQ ID NO: 13491 - DNA, 20 bp, Artificial Sequence
  Description of Artificial Sequence: Synthetic oligonucleotide
  Target: APOC3; (+) strand; PAM type: YTN; PAM sequence: TTA
gattctcataaggagccctc

SEQ ID NO: 13492 - DNA, 20 bp, Artificial Sequence
  Description of Artificial Sequence: Synthetic oligonucleotide
  Target: APOC3; (+) strand; PAM type: YTN; PAM sequence: TTC
tcataaggagccctccacct

SEQ ID NO: 13493 - DNA, 20 bp, Artificial Sequence
  Description of Artificial Sequence: Synthetic oligonucleotide
  Target: APOC3; (+) strand; PAM type: YTN; PAM sequence: CTC
ataaggagccctccacctag

SEQ ID NO: 13494 - DNA, 20 bp, Artificial Sequence
  Description of Artificial Sequence: Synthetic oligonucleotide
  Target: APOC3; (+) strand; PAM type: YTN; PAM sequence: CTC
cacctagatccctggcatgt

SEQ ID NO: 13495 - DNA, 20 bp, Artificial Sequence
  Description of Artificial Sequence: Synthetic oligonucleotide
  Target: APOC3; (+) strand; PAM type: YTN; PAM sequence: CTA
gatccctggcatgtgcagtt

SEQ ID NO: 13496 - DNA, 20 bp, Artificial Sequence
  Description of Artificial Sequence: Synthetic oligonucleotide
  Target: APOC3; (+) strand; PAM type: YTN; PAM sequence: CTG
gcatgtgcagttcacaatag

SEQ ID NO: 13497 - DNA, 20 bp, Artificial Sequence
  Description of Artificial Sequence: Synthetic oligonucleotide
  Target: APOC3; (+) strand; PAM type: YTN; PAM sequence: TTC
acaatagggttcacactcct

SEQ ID NO: 13498 - DNA, 20 bp, Artificial Sequence
  Description of Artificial Sequence: Synthetic oligonucleotide
  Target: APOC3; (+) strand; PAM type: YTN; PAM sequence: TTC
acactcctatgagaatgtaa

SEQ ID NO: 13499 - DNA, 20 bp, Artificial Sequence
  Description of Artificial Sequence: Synthetic oligonucleotide
  Target: APOC3; (+) strand; PAM type: YTN; PAM sequence: CTC
ctatgagaatgtaaggccac

SEQ ID NO: 13500 - DNA, 20 bp, Artificial Sequence
  Description of Artificial Sequence: Synthetic oligonucleotide
  Target: APOC3; (+) strand; PAM type: YTN; PAM sequence: CTA
tgagaatgtaaggccacttg

SEQ ID NO: 13501 - DNA, 20 bp, Artificial Sequence
  Description of Artificial Sequence: Synthetic oligonucleotide
  Target: APOC3; (+) strand; PAM type: YTN; PAM sequence: CTT
gatctgacaggaggcggagc

SEQ ID NO: 13502 - DNA, 20 bp, Artificial Sequence
  Description of Artificial Sequence: Synthetic oligonucleotide
  Target: APOC3; (+) strand; PAM type: YTN; PAM sequence: TTG
atctgacaggaggcggagct

SEQ ID NO: 13503 - DNA, 20 bp, Artificial Sequence
  Description of Artificial Sequence: Synthetic oligonucleotide
  Target: APOC3; (+) strand; PAM type: YTN; PAM sequence: CTG
acaggaggcggagctcaggc

SEQ ID NO: 13504 - DNA, 20 bp, Artificial Sequence
  Description of Artificial Sequence: Synthetic oligonucleotide
  Target: APOC3; (+) strand; PAM type: YTN; PAM sequence: CTC
aggcggtattgctcactcac

SEQ ID NO: 13505 - DNA, 20 bp, Artificial Sequence
  Description of Artificial Sequence: Synthetic oligonucleotide
  Target: APOC3; (+) strand; PAM type: YTN; PAM sequence: TTG
ctcactcacccaccactcac

SEQ ID NO: 13506 - DNA, 20 bp, Artificial Sequence
  Description of Artificial Sequence: Synthetic oligonucleotide
  Target: APOC3; (+) strand; PAM type: YTN; PAM sequence: CTC
actcacccaccactcacttc

SEQ ID NO: 13507 - DNA, 20 bp, Artificial Sequence
  Description of Artificial Sequence: Synthetic oligonucleotide
  Target: APOC3; (+) strand; PAM type: YTN; PAM sequence: CTC
acccaccactcacttcgtgc

SEQ ID NO: 13508 - DNA, 20 bp, Artificial Sequence
  Description of Artificial Sequence: Synthetic oligonucleotide
  Target: APOC3; (+) strand; PAM type: YTN; PAM sequence: CTC
acttcgtgctgtgcagcccg

SEQ ID NO: 13509 - DNA, 20 bp, Artificial Sequence
  Description of Artificial Sequence: Synthetic oligonucleotide
  Target: APOC3; (+) strand; PAM type: YTN; PAM sequence: CTT
cgtgctgtgcagcccggctc

SEQ ID NO: 13510 - DNA, 20 bp, Artificial Sequence
  Description of Artificial Sequence: Synthetic oligonucleotide
  Target: APOC3; (+) strand; PAM type: YTN; PAM sequence: TTC
gtgctgtgcagcccggctcc

SEQ ID NO: 13511 - DNA, 20 bp, Artificial Sequence
  Description of Artificial Sequence: Synthetic oligonucleotide
  Target: APOC3; (+) strand; PAM type: YTN; PAM sequence: CTG
tgcagcccggctcctaacag

SEQ ID NO: 13512 - DNA, 20 bp, Artificial Sequence
  Description of Artificial Sequence: Synthetic oligonucleotide
  Target: APOC3; (+) strand; PAM type: YTN; PAM sequence: CTC
ctaacagtccatggaccagt

SEQ ID NO: 13513 - DNA, 20 bp, Artificial Sequence
  Description of Artificial Sequence: Synthetic oligonucleotide
  Target: APOC3; (+) strand; PAM type: YTN; PAM sequence: CTA
acagtccatggaccagtacc

SEQ ID NO: 13514 - DNA, 20 bp, Artificial Sequence
  Description of Artificial Sequence: Synthetic oligonucleotide
  Target: APOC3; (+) strand; PAM type: YTN; PAM sequence: CTA
tctatgacttgggggttggg

SEQ ID NO: 13515 - DNA, 20 bp, Artificial Sequence
  Description of Artificial Sequence: Synthetic oligonucleotide
  Target: APOC3; (+) strand; PAM type: YTN; PAM sequence: CTA
tgacttgggggttggggacc

SEQ ID NO: 13516 - DNA, 20 bp, Artificial Sequence
  Description of Artificial Sequence: Synthetic oligonucleotide
  Target: APOC3; (+) strand; PAM type: YTN; PAM sequence: CTT
gggggttggggacccctggg

SEQ ID NO: 13517 - DNA, 20 bp, Artificial Sequence
  Description of Artificial Sequence: Synthetic oligonucleotide
  Target: APOC3; (+) strand; PAM type: YTN; PAM sequence: TTG
ggggttggggacccctgggc

SEQ ID NO: 13518 - DNA, 20 bp, Artificial Sequence
  Description of Artificial Sequence: Synthetic oligonucleotide
  Target: APOC3; (+) strand; PAM type: YTN; PAM sequence: TTG
gggacccctgggctaggggt

SEQ ID NO: 13519 - DNA, 20 bp, Artificial Sequence
  Description of Artificial Sequence: Synthetic oligonucleotide
  Target: APOC3; (+) strand; PAM type: YTN; PAM sequence: CTG
ggctaggggtttgccttggg

SEQ ID NO: 13520 - DNA, 20 bp, Artificial Sequence
  Description of Artificial Sequence: Synthetic oligonucleotide
  Target: APOC3; (+) strand; PAM type: YTN; PAM sequence: CTA
ggggtttgccttgggaggcc

SEQ ID NO: 13521 - DNA, 20 bp, Artificial Sequence
  Description of Artificial Sequence: Synthetic oligonucleotide
  Target: APOC3; (+) strand; PAM type: YTN; PAM sequence: TTT
gccttgggaggccccacctg

SEQ ID NO: 13522 - DNA, 20 bp, Artificial Sequence
  Description of Artificial Sequence: Synthetic oligonucleotide
  Target: APOC3; (+) strand; PAM type: YTN; PAM sequence: TTG
ccttgggaggccccacctga

SEQ ID NO: 13523 - DNA, 20 bp, Artificial Sequence
  Description of Artificial Sequence: Synthetic oligonucleotide
  Target: APOC3; (+) strand; PAM type: YTN; PAM sequence: CTT
gggaggccccacctgaccca

SEQ ID NO: 13524 - DNA, 20 bp, Artificial Sequence
  Description of Artificial Sequence: Synthetic oligonucleotide
  Target: APOC3; (+) strand; PAM type: YTN; PAM sequence: TTG
ggaggccccacctgacccaa

SEQ ID NO: 13525 - DNA, 20 bp, Artificial Sequence
  Description of Artificial Sequence: Synthetic oligonucleotide
  Target: APOC3; (+) strand; PAM type: YTN; PAM sequence: CTG
acccaattcaagcccgtgag

SEQ ID NO: 13526 - DNA, 20 bp, Artificial Sequence
  Description of Artificial Sequence: Synthetic oligonucleotide
  Target: APOC3; (+) strand; PAM type: YTN; PAM sequence: TTC
aagcccgtgagtgcttctgc

SEQ ID NO: 13527 - DNA, 20 bp, Artificial Sequence
  Description of Artificial Sequence: Synthetic oligonucleotide
  Target: APOC3; (+) strand; PAM type: YTN; PAM sequence: CTT
ctgctttgttctaagacctg

SEQ ID NO: 13528 - DNA, 20 bp, Artificial Sequence
  Description of Artificial Sequence: Synthetic oligonucleotide
  Target: APOC3; (+) strand; PAM type: YTN; PAM sequence: TTC
tgctttgttctaagacctgg

SEQ ID NO: 13529 - DNA, 20 bp, Artificial Sequence
  Description of Artificial Sequence: Synthetic oligonucleotide
  Target: APOC3; (+) strand; PAM type: YTN; PAM sequence: CTG
ctttgttctaagacctgggg

SEQ ID NO: 13530 - DNA, 20 bp, Artificial Sequence
  Description of Artificial Sequence: Synthetic oligonucleotide
  Target: APOC3; (+) strand; PAM type: YTN; PAM sequence: CTT
tgttctaagacctggggcca

SEQ ID NO: 13531 - DNA, 20 bp, Artificial Sequence
  Description of Artificial Sequence: Synthetic oligonucleotide
  Target: APOC3; (+) strand; PAM type: YTN; PAM sequence: TTT
gttctaagacctggggccag

SEQ ID NO: 13532 - DNA, 20 bp, Artificial Sequence
  Description of Artificial Sequence: Synthetic oligonucleotide
  Target: APOC3; (+) strand; PAM type: YTN; PAM sequence: TTG
ttctaagacctggggccagt

SEQ ID NO: 13533 - DNA, 20 bp, Artificial Sequence
  Description of Artificial Sequence: Synthetic oligonucleotide
  Target: APOC3; (+) strand; PAM type: YTN; PAM sequence: TTC
taagacctggggccagtgtg

SEQ ID NO: 13534 - DNA, 20 bp, Artificial Sequence
  Description of Artificial Sequence: Synthetic oligonucleotide
  Target: APOC3; (+) strand; PAM type: YTN; PAM sequence: CTA
agacctggggccagtgtgag

SEQ ID NO: 13535 - DNA, 20 bp, Artificial Sequence
  Description of Artificial Sequence: Synthetic oligonucleotide
  Target: APOC3; (+) strand; PAM type: YTN; PAM sequence: CTG
gggccagtgtgagcagaagt

SEQ ID NO: 13536 - DNA, 20 bp, Artificial Sequence
  Description of Artificial Sequence: Synthetic oligonucleotide
  Target: APOC3; (+) strand; PAM type: YTN; PAM sequence: CTT
cctctcccatcctgcccctg

SEQ ID NO: 13537 - DNA, 20 bp, Artificial Sequence
  Description of Artificial Sequence: Synthetic oligonucleotide
  Target: APOC3; (+) strand; PAM type: YTN; PAM sequence: TTC
ctctcccatcctgcccctgc

SEQ ID NO: 13538 - DNA, 20 bp, Artificial Sequence
  Description of Artificial Sequence: Synthetic oligonucleotide
  Target: APOC3; (+) strand; PAM type: YTN; PAM sequence: CTC
tcccatcctgcccctgccca

SEQ ID NO: 13539 - DNA, 20 bp, Artificial Sequence
  Description of Artificial Sequence: Synthetic oligonucleotide
  Target: APOC3; (+) strand; PAM type: YTN; PAM sequence: CTC
ccatcctgcccctgcccatc

SEQ ID NO: 13540 - DNA, 20 bp, Artificial Sequence
  Description of Artificial Sequence: Synthetic oligonucleotide
  Target: APOC3; (+) strand; PAM type: YTN; PAM sequence: CTG
cccctgcccatcagtactct

SEQ ID NO: 13541 - DNA, 20 bp, Artificial Sequence
  Description of Artificial Sequence: Synthetic oligonucleotide
  Target: APOC3; (+) strand; PAM type: YTN; PAM sequence: CTG
cccatcagtactctcctctc

SEQ ID NO: 13542 - DNA, 20 bp, Artificial Sequence
  Description of Artificial Sequence: Synthetic oligonucleotide
  Target: APOC3; (+) strand; PAM type: YTN; PAM sequence: CTC
tcctctcccctactcccttc

SEQ ID NO: 13543 - DNA, 20 bp, Artificial Sequence
  Description of Artificial Sequence: Synthetic oligonucleotide
  Target: APOC3; (+) strand; PAM type: YTN; PAM sequence: CTC
ctctcccctactcccttctc

SEQ ID NO: 13544 - DNA, 20 bp, Artificial Sequence
  Description of Artificial Sequence: Synthetic oligonucleotide
  Target: APOC3; (+) strand; PAM type: YTN; PAM sequence: CTC
tcccctactcccttctccac

SEQ ID NO: 13545 - DNA, 20 bp, Artificial Sequence
  Description of Artificial Sequence: Synthetic oligonucleotide
  Target: APOC3; (+) strand; PAM type: YTN; PAM sequence: CTC
ccctactcccttctccacct

SEQ ID NO: 13546 - DNA, 20 bp, Artificial Sequence
  Description of Artificial Sequence: Synthetic oligonucleotide
  Target: APOC3; (+) strand; PAM type: YTN; PAM sequence: CTA
ctcccttctccacctcaccc

SEQ ID NO: 13547 - DNA, 20 bp, Artificial Sequence
  Description of Artificial Sequence: Synthetic oligonucleotide
  Target: APOC3; (+) strand; PAM type: YTN; PAM sequence: CTC
ccttctccacctcaccctga

SEQ ID NO: 13548 - DNA, 20 bp, Artificial Sequence
  Description of Artificial Sequence: Synthetic oligonucleotide
  Target: APOC3; (+) strand; PAM type: YTN; PAM sequence: CTT
ctccacctcaccctgactgg

SEQ ID NO: 13549 - DNA, 20 bp, Artificial Sequence
  Description of Artificial Sequence: Synthetic oligonucleotide
  Target: APOC3; (+) strand; PAM type: YTN; PAM sequence: TTC
tccacctcaccctgactggc

SEQ ID NO: 13550 - DNA, 20 bp, Artificial Sequence
  Description of Artificial Sequence: Synthetic oligonucleotide
  Target: APOC3; (+) strand; PAM type: YTN; PAM sequence: CTC
cacctcaccctgactggcat

SEQ ID NO: 13551 - DNA, 20 bp, Artificial Sequence
  Description of Artificial Sequence: Synthetic oligonucleotide
  Target: APOC3; (+) strand; PAM type: YTN; PAM sequence: CTC
accctgactggcattagctg

SEQ ID NO: 13552 - DNA, 20 bp, Artificial Sequence
  Description of Artificial Sequence: Synthetic oligonucleotide
  Target: APOC3; (+) strand; PAM type: YTN; PAM sequence: CTG
actggcattagctggcatag

SEQ ID NO: 13553 - DNA, 20 bp, Artificial Sequence
  Description of Artificial Sequence: Synthetic oligonucleotide
  Target: APOC3; (+) strand; PAM type: YTN; PAM sequence: CTG
gcattagctggcatagcaga

SEQ ID NO: 13554 - DNA, 20 bp, Artificial Sequence
  Description of Artificial Sequence: Synthetic oligonucleotide
  Target: APOC3; (+) strand; PAM type: YTN; PAM sequence: TTA
gctggcatagcagaggtgtt

SEQ ID NO: 13555 - DNA, 20 bp, Artificial Sequence
  Description of Artificial Sequence: Synthetic oligonucleotide
  Target: APOC3; (+) strand; PAM type: YTN; PAM sequence: CTG
gcatagcagaggtgttcata

SEQ ID NO: 13556 - DNA, 20 bp, Artificial Sequence
  Description of Artificial Sequence: Synthetic oligonucleotide
  Target: APOC3; (+) strand; PAM type: YTN; PAM sequence: TTC
ataaacattcttagtcccca

SEQ ID NO: 13557 - DNA, 20 bp, Artificial Sequence
  Description of Artificial Sequence: Synthetic oligonucleotide
  Target: APOC3; (+) strand; PAM type: YTN; PAM sequence: TTC
ttagtccccagaaccggctt

SEQ ID NO: 13558 - DNA, 20 bp, Artificial Sequence
  Description of Artificial Sequence: Synthetic oligonucleotide
  Target: APOC3; (+) strand; PAM type: YTN; PAM sequence: CTT
agtccccagaaccggctttg

SEQ ID NO: 13559 - DNA, 20 bp, Artificial Sequence
  Description of Artificial Sequence: Synthetic oligonucleotide
  Target: APOC3; (+) strand; PAM type: YTN; PAM sequence: TTA
gtccccagaaccggctttgg

SEQ ID NO: 13560 - DNA, 20 bp, Artificial Sequence
  Description of Artificial Sequence: Synthetic oligonucleotide
  Target: APOC3; (+) strand; PAM type: YTN; PAM sequence: CTT
tggggtaggtgttattttct

SEQ ID NO: 13561 - DNA, 20 bp, Artificial Sequence
  Description of Artificial Sequence: Synthetic oligonucleotide
  Target: APOC3; (+) strand; PAM type: YTN; PAM sequence: TTT
ggggtaggtgttattttctc

SEQ ID NO: 13562 - DNA, 20 bp, Artificial Sequence
  Description of Artificial Sequence: Synthetic oligonucleotide
  Target: APOC3; (+) strand; PAM type: YTN; PAM sequence: TTG
gggtaggtgttattttctca

SEQ ID NO: 13563 - DNA, 20 bp, Artificial Sequence
  Description of Artificial Sequence: Synthetic oligonucleotide
  Target: APOC3; (+) strand; PAM type: YTN; PAM sequence: TTA
ttttctcactttgcagatga

SEQ ID NO: 13564 - DNA, 20 bp, Artificial Sequence
  Description of Artificial Sequence: Synthetic oligonucleotide
  Target: APOC3; (+) strand; PAM type: YTN; PAM sequence: TTT
tctcactttgcagatgagaa

SEQ ID NO: 13565 - DNA, 20 bp, Artificial Sequence
  Description of Artificial Sequence: Synthetic oligonucleotide
  Target: APOC3; (+) strand; PAM type: YTN; PAM sequence: TTT
ctcactttgcagatgagaaa

SEQ ID NO: 13566 - DNA, 20 bp, Artificial Sequence
  Description of Artificial Sequence: Synthetic oligonucleotide
  Target: APOC3; (+) strand; PAM type: YTN; PAM sequence: TTC
tcactttgcagatgagaaaa

SEQ ID NO: 13567 - DNA, 20 bp, Artificial Sequence
  Description of Artificial Sequence: Synthetic oligonucleotide
  Target: APOC3; (+) strand; PAM type: YTN; PAM sequence: CTC
actttgcagatgagaaaatt

SEQ ID NO: 13568 - DNA, 20 bp, Artificial Sequence
  Description of Artificial Sequence: Synthetic oligonucleotide
  Target: APOC3; (+) strand; PAM type: YTN; PAM sequence: CTT
tgcagatgagaaaattgagg

SEQ ID NO: 13569 - DNA, 20 bp, Artificial Sequence
  Description of Artificial Sequence: Synthetic oligonucleotide
  Target: APOC3; (+) strand; PAM type: YTN; PAM sequence: TTT
gcagatgagaaaattgaggc

SEQ ID NO: 13570 - DNA, 20 bp, Artificial Sequence
  Description of Artificial Sequence: Synthetic oligonucleotide
  Target: APOC3; (+) strand; PAM type: YTN; PAM sequence: TTG
cagatgagaaaattgaggct

SEQ ID NO: 13571 - DNA, 20 bp, Artificial Sequence
  Description of Artificial Sequence: Synthetic oligonucleotide
  Target: APOC3; (+) strand; PAM type: YTN; PAM sequence: TTG
aggctcagagcgattaggtg

SEQ ID NO: 13572 - DNA, 20 bp, Artificial Sequence
  Description of Artificial Sequence: Synthetic oligonucleotide
  Target: APOC3; (+) strand; PAM type: YTN; PAM sequence: CTC
agagcgattaggtgacctgc

SEQ ID NO: 13573 - DNA, 20 bp, Artificial Sequence
  Description of Artificial Sequence: Synthetic oligonucleotide
  Target: APOC3; (+) strand; PAM type: YTN; PAM sequence: TTA
ggtgacctgccccagatcac

SEQ ID NO: 13574 - DNA, 20 bp, Artificial Sequence
  Description of Artificial Sequence: Synthetic oligonucleotide
  Target: APOC3; (+) strand; PAM type: YTN; PAM sequence: CTG
ccccagatcacacaactaat

SEQ ID NO: 13575 - DNA, 20 bp, Artificial Sequence
  Description of Artificial Sequence: Synthetic oligonucleotide
  Target: APOC3; (+) strand; PAM type: YTN; PAM sequence: CTA
atcaatcctccaatgacttt

SEQ ID NO: 13576 - DNA, 20 bp, Artificial Sequence
  Description of Artificial Sequence: Synthetic oligonucleotide
  Target: APOC3; (+) strand; PAM type: YTN; PAM sequence: CTC
caatgactttccaaatgaga

SEQ ID NO: 13577 - DNA, 20 bp, Artificial Sequence
  Description of Artificial Sequence: Synthetic oligonucleotide
  Target: APOC3; (+) strand; PAM type: YTN; PAM sequence: CTT
tccaaatgagaggctgcctc

SEQ ID NO: 13578 - DNA, 20 bp, Artificial Sequence
  Description of Artificial Sequence: Synthetic oligonucleotide
  Target: APOC3; (+) strand; PAM type: YTN; PAM sequence: TTT
ccaaatgagaggctgcctcc

SEQ ID NO: 13579 - DNA, 20 bp, Artificial Sequence
  Description of Artificial Sequence: Synthetic oligonucleotide
  Target: APOC3; (+) strand; PAM type: YTN; PAM sequence: TTC
caaatgagaggctgcctccc

SEQ ID NO: 13580 - DNA, 20 bp, Artificial Sequence
  Description of Artificial Sequence: Synthetic oligonucleotide
  Target: APOC3; (+) strand; PAM type: YTN; PAM sequence: CTG
cctccctctgtcctaccctg

SEQ ID NO: 13581 - DNA, 20 bp, Artificial Sequence
  Description of Artificial Sequence: Synthetic oligonucleotide
  Target: APOC3; (+) strand; PAM type: YTN; PAM sequence: CTC
cctctgtcctaccctgctca

SEQ ID NO: 13582 - DNA, 20 bp, Artificial Sequence
  Description of Artificial Sequence: Synthetic oligonucleotide
  Target: APOC3; (+) strand; PAM type: YTN; PAM sequence: CTC
tgtcctaccctgctcagagc

SEQ ID NO: 13583 - DNA, 20 bp, Artificial Sequence
  Description of Artificial Sequence: Synthetic oligonucleotide
  Target: APOC3; (+) strand; PAM type: YTN; PAM sequence: CTG
tcctaccctgctcagagcca

SEQ ID NO: 13584 - DNA, 20 bp, Artificial Sequence
  Description of Artificial Sequence: Synthetic oligonucleotide
  Target: APOC3; (+) strand; PAM type: YTN; PAM sequence: CTA
ccctgctcagagccaccagg

SEQ ID NO: 13585 - DNA, 20 bp, Artificial Sequence
  Description of Artificial Sequence: Synthetic oligonucleotide
  Target: APOC3; (+) strand; PAM type: YTN; PAM sequence: CTG
ctcagagccaccaggttgtg

SEQ ID NO: 13586 - DNA, 20 bp, Artificial Sequence
  Description of Artificial Sequence: Synthetic oligonucleotide
  Target: APOC3; (+) strand; PAM type: YTN; PAM sequence: CTC
agagccaccaggttgtgcaa

SEQ ID NO: 13587 - DNA, 20 bp, Artificial Sequence
  Description of Artificial Sequence: Synthetic oligonucleotide
  Target: APOC3; (+) strand; PAM type: YTN; PAM sequence: TTG
tgcaactccaggcggtgctg

SEQ ID NO: 13588 - DNA, 20 bp, Artificial Sequence
  Description of Artificial Sequence: Synthetic oligonucleotide
  Target: APOC3; (+) strand; PAM type: YTN; PAM sequence: CTC
caggcggtgctgtttgcaca

SEQ ID NO: 13589 - DNA, 20 bp, Artificial Sequence
  Description of Artificial Sequence: Synthetic oligonucleotide
  Target: APOC3; (+) strand; PAM type: YTN; PAM sequence: CTG
tttgcacagaaaacaatgac

SEQ ID NO: 13590 - DNA, 20 bp, Artificial Sequence
  Description of Artificial Sequence: Synthetic oligonucleotide
  Target: APOC3; (+) strand; PAM type: YTN; PAM sequence: TTT
gcacagaaaacaatgacagc

SEQ ID NO: 13591 - DNA, 20 bp, Artificial Sequence
  Description of Artificial Sequence: Synthetic oligonucleotide
  Target: APOC3; (+) strand; PAM type: YTN; PAM sequence: TTG
cacagaaaacaatgacagcc

SEQ ID NO: 13592 - DNA, 20 bp, Artificial Sequence
  Description of Artificial Sequence: Synthetic oligonucleotide
  Target: APOC3; (+) strand; PAM type: YTN; PAM sequence: CTT
gacctttcacatctccccac

SEQ ID NO: 13593 - DNA, 20 bp, Artificial Sequence
  Description of Artificial Sequence: Synthetic oligonucleotide
  Target: APOC3; (+) strand; PAM type: YTN; PAM sequence: TTG
acctttcacatctccccacc

SEQ ID NO: 13594 - DNA, 20 bp, Artificial Sequence
  Description of Artificial Sequence: Synthetic oligonucleotide
  Target: APOC3; (+) strand; PAM type: YTN; PAM sequence: CTT
tcacatctccccaccctgtc

SEQ ID NO: 13595 - DNA, 20 bp, Artificial Sequence
  Description of Artificial Sequence: Synthetic oligonucleotide
  Target: APOC3; (+) strand; PAM type: YTN; PAM sequence: TTT
cacatctccccaccctgtca

SEQ ID NO: 13596 - DNA, 20 bp, Artificial Sequence
  Description of Artificial Sequence: Synthetic oligonucleotide
  Target: APOC3; (+) strand; PAM type: YTN; PAM sequence: TTC
acatctccccaccctgtcac

SEQ ID NO: 13597 - DNA, 20 bp, Artificial Sequence
  Description of Artificial Sequence: Synthetic oligonucleotide
  Target: APOC3; (+) strand; PAM type: YTN; PAM sequence: CTC
cccaccctgtcactttgtgc

SEQ ID NO: 13598 - DNA, 20 bp, Artificial Sequence
  Description of Artificial Sequence: Synthetic oligonucleotide
  Target: APOC3; (+) strand; PAM type: YTN; PAM sequence: CTG
tcactttgtgcctcaggccc

SEQ ID NO: 13599 - DNA, 20 bp, Artificial Sequence
  Description of Artificial Sequence: Synthetic oligonucleotide
  Target: APOC3; (+) strand; PAM type: YTN; PAM sequence: CTT
tgtgcctcaggcccaggggc

SEQ ID NO: 13600 - DNA, 20 bp, Artificial Sequence
  Description of Artificial Sequence: Synthetic oligonucleotide
  Target: APOC3; (+) strand; PAM type: YTN; PAM sequence: TTT
gtgcctcaggcccaggggca

SEQ ID NO: 13601 - DNA, 20 bp, Artificial Sequence
  Description of Artificial Sequence: Synthetic oligonucleotide
  Target: APOC3; (+) strand; PAM type: YTN; PAM sequence: TTG
tgcctcaggcccaggggcat

SEQ ID NO: 13602 - DNA, 20 bp, Artificial Sequence
  Description of Artificial Sequence: Synthetic oligonucleotide
  Target: APOC3; (+) strand; PAM type: YTN; PAM sequence: CTC
aggcccaggggcataaacat

SEQ ID NO: 13603 - DNA, 20 bp, Artificial Sequence
  Description of Artificial Sequence: Synthetic oligonucleotide
  Target: APOC3; (+) strand; PAM type: YTN; PAM sequence: CTG
aggtgacctggagatggcag

SEQ ID NO: 13604 - DNA, 20 bp, Artificial Sequence
  Description of Artificial Sequence: Synthetic oligonucleotide
  Target: APOC3; (+) strand; PAM type: YTN; PAM sequence: CTG
gagatggcagggtttgactt

SEQ ID NO: 13605 - DNA, 20 bp, Artificial Sequence
  Description of Artificial Sequence: Synthetic oligonucleotide
  Target: APOC3; (+) strand; PAM type: YTN; PAM sequence: TTT
gacttgtgctggggttcctg

SEQ ID NO: 13606 - DNA, 20 bp, Artificial Sequence
  Description of Artificial Sequence: Synthetic oligonucleotide
  Target: APOC3; (+) strand; PAM type: YTN; PAM sequence: TTG
acttgtgctggggttcctgc

SEQ ID NO: 13607 - DNA, 20 bp, Artificial Sequence
  Description of Artificial Sequence: Synthetic oligonucleotide
  Target: APOC3; (+) strand; PAM type: YTN; PAM sequence: CTT
gtgctggggttcctgcaagg

SEQ ID NO: 13608 - DNA, 20 bp, Artificial Sequence
  Description of Artificial Sequence: Synthetic oligonucleotide
  Target: APOC3; (+) strand; PAM type: YTN; PAM sequence: TTG
tgctggggttcctgcaagga

SEQ ID NO: 13609 - DNA, 20 bp, Artificial Sequence
  Description of Artificial Sequence: Synthetic oligonucleotide
  Target: APOC3; (+) strand; PAM type: YTN; PAM sequence: CTG
gggttcctgcaaggatatct

SEQ ID NO: 13610 - DNA, 20 bp, Artificial Sequence
  Description of Artificial Sequence: Synthetic oligonucleotide
  Target: APOC3; (+) strand; PAM type: YTN; PAM sequence: TTC
ctgcaaggatatctcttctc

SEQ ID NO: 13611 - DNA, 20 bp, Artificial Sequence
  Description of Artificial Sequence: Synthetic oligonucleotide
  Target: APOC3; (+) strand; PAM type: YTN; PAM sequence: CTG
caaggatatctcttctccca

SEQ ID NO: 13612 - DNA, 20 bp, Artificial Sequence
  Description of Artificial Sequence: Synthetic oligonucleotide
  Target: APOC3; (+) strand; PAM type: YTN; PAM sequence: CTC
ttctcccagggtggcagctg

SEQ ID NO: 13613 - DNA, 20 bp, Artificial Sequence
  Description of Artificial Sequence: Synthetic oligonucleotide
  Target: APOC3; (+) strand; PAM type: YTN; PAM sequence: CTT
ctcccagggtggcagctgtg

SEQ ID NO: 13614 - DNA, 20 bp, Artificial Sequence
  Description of Artificial Sequence: Synthetic oligonucleotide
  Target: APOC3; (+) strand; PAM type: YTN; PAM sequence: TTC
tcccagggtggcagctgtgg

SEQ ID NO: 13615 - DNA, 20 bp, Artificial Sequence
  Description of Artificial Sequence: Synthetic oligonucleotide
  Target: APOC3; (+) strand; PAM type: YTN; PAM sequence: CTC
ccagggtggcagctgtgggg

SEQ ID NO: 13616 - DNA, 20 bp, Artificial Sequence
  Description of Artificial Sequence: Synthetic oligonucleotide
  Target: APOC3; (+) strand; PAM type: YTN; PAM sequence: CTG
tgggggattcctgcctgagg

SEQ ID NO: 13617 - DNA, 20 bp, Artificial Sequence
  Description of Artificial Sequence: Synthetic oligonucleotide
  Target: APOC3; (+) strand; PAM type: YTN; PAM sequence: TTC
ctgcctgaggtctcagggct

SEQ ID NO: 13618 - DNA, 20 bp, Artificial Sequence
  Description of Artificial Sequence: Synthetic oligonucleotide
  Target: APOC3; (+) strand; PAM type: YTN; PAM sequence: CTG
cctgaggtctcagggctgtc

SEQ ID NO: 13619 - DNA, 20 bp, Artificial Sequence
  Description of Artificial Sequence: Synthetic oligonucleotide
  Target: APOC3; (+) strand; PAM type: YTN; PAM sequence: CTG
aggtctcagggctgtcgtcc

SEQ ID NO: 13620 - DNA, 20 bp, Artificial Sequence
  Description of Artificial Sequence: Synthetic oligonucleotide
  Target: APOC3; (+) strand; PAM type: YTN; PAM sequence: CTC
agggctgtcgtccagtgaag

SEQ ID NO: 13621 - DNA, 20 bp, Artificial Sequence
  Description of Artificial Sequence: Synthetic oligonucleotide
  Target: APOC3; (+) strand; PAM type: YTN; PAM sequence: CTG
tcgtccagtgaagttgagag

SEQ ID NO: 13622 - DNA, 20 bp, Artificial Sequence
  Description of Artificial Sequence: Synthetic oligonucleotide
  Target: APOC3; (+) strand; PAM type: YTN; PAM sequence: TTG
agagggtggtgtggtcctga

SEQ ID NO: 13623 - DNA, 20 bp, Artificial Sequence
  Description of Artificial Sequence: Synthetic oligonucleotide
  Target: APOC3; (+) strand; PAM type: YTN; PAM sequence: CTG
actggtgtcgtccagtgggg

SEQ ID NO: 13624 - DNA, 20 bp, Artificial Sequence
  Description of Artificial Sequence: Synthetic oligonucleotide
  Target: APOC3; (+) strand; PAM type: YTN; PAM sequence: CTG
gtgtcgtccagtggggacat

SEQ ID NO: 13625 - DNA, 20 bp, Artificial Sequence
  Description of Artificial Sequence: Synthetic oligonucleotide
  Target: APOC3; (+) strand; PAM type: YTN; PAM sequence: TTG
cctacagaggagttctcatg

SEQ ID NO: 13626 - DNA, 20 bp, Artificial Sequence
  Description of Artificial Sequence: Synthetic oligonucleotide
  Target: APOC3; (+) strand; PAM type: YTN; PAM sequence: CTA
cagaggagttctcatgccct

SEQ ID NO: 13627 - DNA, 20 bp, Artificial Sequence
  Description of Artificial Sequence: Synthetic oligonucleotide
  Target: APOC3; (+) strand; PAM type: YTN; PAM sequence: TTC
tcatgccctgctctgttgct

SEQ ID NO: 13628 - DNA, 20 bp, Artificial Sequence
  Description of Artificial Sequence: Synthetic oligonucleotide
  Target: APOC3; (+) strand; PAM type: YTN; PAM sequence: CTC
atgccctgctctgttgcttc

SEQ ID NO: 13629 - DNA, 20 bp, Artificial Sequence
  Description of Artificial Sequence: Synthetic oligonucleotide
  Target: APOC3; (+) strand; PAM type: YTN; PAM sequence: CTG
ctctgttgcttcccctgact

SEQ ID NO: 13630 - DNA, 20 bp, Artificial Sequence
  Description of Artificial Sequence: Synthetic oligonucleotide
  Target: APOC3; (+) strand; PAM type: YTN; PAM sequence: CTC
tgttgcttcccctgactgat

SEQ ID NO: 13631 - DNA, 20 bp, Artificial Sequence
  Description of Artificial Sequence: Synthetic oligonucleotide
  Target: APOC3; (+) strand; PAM type: YTN; PAM sequence: CTG
ttgcttcccctgactgattt

SEQ ID NO: 13632 - DNA, 20 bp, Artificial Sequence
  Description of Artificial Sequence: Synthetic oligonucleotide
  Target: APOC3; (+) strand; PAM type: YTN; PAM sequence: TTG
cttcccctgactgatttagg

SEQ ID NO: 13633 - DNA, 20 bp, Artificial Sequence
  Description of Artificial Sequence: Synthetic oligonucleotide
  Target: APOC3; (+) strand; PAM type: YTN; PAM sequence: CTT
cccctgactgatttaggggc

SEQ ID NO: 13634 - DNA, 20 bp, Artificial Sequence
  Description of Artificial Sequence: Synthetic oligonucleotide
  Target: APOC3; (+) strand; PAM type: YTN; PAM sequence: TTC
ccctgactgatttaggggct

SEQ ID NO: 13635 - DNA, 20 bp, Artificial Sequence
  Description of Artificial Sequence: Synthetic oligonucleotide
  Target: APOC3; (+) strand; PAM type: YTN; PAM sequence: CTG
actgatttaggggctgggtg

SEQ ID NO: 13636 - DNA, 20 bp, Artificial Sequence
  Description of Artificial Sequence: Synthetic oligonucleotide
  Target: APOC3; (+) strand; PAM type: YTN; PAM sequence: CTG
atttaggggctgggtgaccg

SEQ ID NO: 13637 - DNA, 20 bp, Artificial Sequence
  Description of Artificial Sequence: Synthetic oligonucleotide
  Target: APOC3; (+) strand; PAM type: YTN; PAM sequence: TTT
aggggctgggtgaccgatgg

SEQ ID NO: 13638 - DNA, 20 bp, Artificial Sequence
  Description of Artificial Sequence: Synthetic oligonucleotide
  Target: APOC3; (+) strand; PAM type: YTN; PAM sequence: TTA
ggggctgggtgaccgatggc

SEQ ID NO: 13639 - DNA, 20 bp, Artificial Sequence
  Description of Artificial Sequence: Synthetic oligonucleotide
  Target: APOC3; (+) strand; PAM type: YTN; PAM sequence: CTG
ggtgaccgatggcttcagtt

SEQ ID NO: 13640 - DNA, 20 bp, Artificial Sequence
  Description of Artificial Sequence: Synthetic oligonucleotide
  Target: APOC3; (+) strand; PAM type: YTN; PAM sequence: CTT
cagttccctgaaagactact

SEQ ID NO: 13641 - DNA, 20 bp, Artificial Sequence
  Description of Artificial Sequence: Synthetic oligonucleotide
  Target: APOC3; (+) strand; PAM type: YTN; PAM sequence: TTC
agttccctgaaagactactg

SEQ ID NO: 13642 - DNA, 20 bp, Artificial Sequence
  Description of Artificial Sequence: Synthetic oligonucleotide
  Target: APOC3; (+) strand; PAM type: YTN; PAM sequence: TTC
cctgaaagactactggagca

SEQ ID NO: 13643 - DNA, 20 bp, Artificial Sequence
  Description of Artificial Sequence: Synthetic oligonucleotide
  Target: APOC3; (+) strand; PAM type: YTN; PAM sequence: CTG
aaagactactggagcaccgt

SEQ ID NO: 13644 - DNA, 20 bp, Artificial Sequence
  Description of Artificial Sequence: Synthetic oligonucleotide
  Target: APOC3; (+) strand; PAM type: YTN; PAM sequence: CTA
ctggagcaccgttaaggaca

SEQ ID NO: 13645 - DNA, 20 bp, Artificial Sequence
  Description of Artificial Sequence: Synthetic oligonucleotide
  Target: APOC3; (+) strand; PAM type: YTN; PAM sequence: CTG
gagcaccgttaaggacaagt

SEQ ID NO: 13646 - DNA, 20 bp, Artificial Sequence
  Description of Artificial Sequence: Synthetic oligonucleotide
  Target: APOC3; (+) strand; PAM type: YTN; PAM sequence: TTA
aggacaagttctctgagttc

SEQ ID NO: 13647 - DNA, 20 bp, Artificial Sequence
  Description of Artificial Sequence: Synthetic oligonucleotide
  Target: APOC3; (+) strand; PAM type: YTN; PAM sequence: TTC
tctgagttctgggatttgga

SEQ ID NO: 13648 - DNA, 20 bp, Artificial Sequence
  Description of Artificial Sequence: Synthetic oligonucleotide
  Target: APOC3; (+) strand; PAM type: YTN; PAM sequence: CTC
tgagttctgggatttggacc

SEQ ID NO: 13649 - DNA, 20 bp, Artificial Sequence
  Description of Artificial Sequence: Synthetic oligonucleotide
  Target: APOC3; (+) strand; PAM type: YTN; PAM sequence: CTG
agttctgggatttggaccct

SEQ ID NO: 13650 - DNA, 20 bp, Artificial Sequence
  Description of Artificial Sequence: Synthetic oligonucleotide
  Target: APOC3; (+) strand; PAM type: YTN; PAM sequence: TTC
tgggatttggaccctgaggt

SEQ ID NO: 13651 - DNA, 20 bp, Artificial Sequence
  Description of Artificial Sequence: Synthetic oligonucleotide
  Target: APOC3; (+) strand; PAM type: YTN; PAM sequence: CTG
ggatttggaccctgaggtca

SEQ ID NO: 13652 - DNA, 20 bp, Artificial Sequence
  Description of Artificial Sequence: Synthetic oligonucleotide
  Target: APOC3; (+) strand; PAM type: YTN; PAM sequence: TTT
ggaccctgaggtcagaccaa

SEQ ID NO: 13653 - DNA, 20 bp, Artificial Sequence
  Description of Artificial Sequence: Synthetic oligonucleotide
  Target: APOC3; (+) strand; PAM type: YTN; PAM sequence: TTG
gaccctgaggtcagaccaac

SEQ ID NO: 13654 - DNA, 20 bp, Artificial Sequence
  Description of Artificial Sequence: Synthetic oligonucleotide
  Target: APOC3; (+) strand; PAM type: YTN; PAM sequence: CTG
aggtcagaccaacttcagcc

SEQ ID NO: 13655 - DNA, 20 bp, Artificial Sequence
  Description of Artificial Sequence: Synthetic oligonucleotide
  Target: APOC3; (+) strand; PAM type: YTN; PAM sequence: CTT
cagccgtggctgcctgagac

SEQ ID NO: 13656 - DNA, 20 bp, Artificial Sequence
  Description of Artificial Sequence: Synthetic oligonucleotide
  Target: APOC3; (+) strand; PAM type: YTN; PAM sequence: TTC
agccgtggctgcctgagacc

SEQ ID NO: 13657 - DNA, 20 bp, Artificial Sequence
  Description of Artificial Sequence: Synthetic oligonucleotide
  Target: APOC3; (+) strand; PAM type: YTN; PAM sequence: CTG
cctgagacctcaatacccca

SEQ ID NO: 13658 - DNA, 20 bp, Artificial Sequence
  Description of Artificial Sequence: Synthetic oligonucleotide
  Target: APOC3; (+) strand; PAM type: YTN; PAM sequence: CTG
agacctcaataccccaagtc

SEQ ID NO: 13659 - DNA, 20 bp, Artificial Sequence
  Description of Artificial Sequence: Synthetic oligonucleotide
  Target: APOC3; (+) strand; PAM type: YTN; PAM sequence: CTC
aataccccaagtccacctgc

SEQ ID NO: 13660 - DNA, 20 bp, Artificial Sequence
  Description of Artificial Sequence: Synthetic oligonucleotide
  Target: APOC3; (+) strand; PAM type: YTN; PAM sequence: CTG
cctatccatcctgcgagctc

SEQ ID NO: 13661 - DNA, 20 bp, Artificial Sequence
  Description of Artificial Sequence: Synthetic oligonucleotide
  Target: APOC3; (+) strand; PAM type: YTN; PAM sequence: CTA
tccatcctgcgagctccttg

SEQ ID NO: 13662 - DNA, 20 bp, Artificial Sequence
  Description of Artificial Sequence: Synthetic oligonucleotide
  Target: APOC3; (+) strand; PAM type: YTN; PAM sequence: CTG
cgagctccttgggtcctgca

SEQ ID NO: 13663 - DNA, 20 bp, Artificial Sequence
  Description of Artificial Sequence: Synthetic oligonucleotide
  Target: APOC3; (+) strand; PAM type: YTN; PAM sequence: CTC
cttgggtcctgcaatctcca

SEQ ID NO: 13664 - DNA, 20 bp, Artificial Sequence
  Description of Artificial Sequence: Synthetic oligonucleotide
  Target: APOC3; (+) strand; PAM type: YTN; PAM sequence: CTT
gggtcctgcaatctccaggg

SEQ ID NO: 13665 - DNA, 20 bp, Artificial Sequence
  Description of Artificial Sequence: Synthetic oligonucleotide
  Target: APOC3; (+) strand; PAM type: YTN; PAM sequence: TTG
ggtcctgcaatctccagggc

SEQ ID NO: 13666 - DNA, 20 bp, Artificial Sequence
  Description of Artificial Sequence: Synthetic oligonucleotide
  Target: APOC3; (+) strand; PAM type: YTN; PAM sequence: CTG
caatctccagggctgcccct

SEQ ID NO: 13667 - DNA, 20 bp, Artificial Sequence
  Description of Artificial Sequence: Synthetic oligonucleotide
  Target: APOC3; (+) strand; PAM type: YTN; PAM sequence: CTC
cagggctgcccctgtaggtt

SEQ ID NO: 13668 - DNA, 20 bp, Artificial Sequence
  Description of Artificial Sequence: Synthetic oligonucleotide
  Target: APOC3; (+) strand; PAM type: YTN; PAM sequence: CTG
cccctgtaggttgcttaaaa

SEQ ID NO: 13669 - DNA, 20 bp, Artificial Sequence
  Description of Artificial Sequence: Synthetic oligonucleotide
  Target: APOC3; (+) strand; PAM type: YTN; PAM sequence: CTG
taggttgcttaaaagggaca

SEQ ID NO: 13670 - DNA, 20 bp, Artificial Sequence
  Description of Artificial Sequence: Synthetic oligonucleotide
  Target: APOC3; (+) strand; PAM type: YTN; PAM sequence: TTG
cttaaaagggacagtattct

SEQ ID NO: 13671 - DNA, 20 bp, Artificial Sequence
  Description of Artificial Sequence: Synthetic oligonucleotide
  Target: APOC3; (+) strand; PAM type: YTN; PAM sequence: CTT
aaaagggacagtattctcag

SEQ ID NO: 13672 - DNA, 20 bp, Artificial Sequence
  Description of Artificial Sequence: Synthetic oligonucleotide
  Target: APOC3; (+) strand; PAM type: YTN; PAM sequence: TTA
aaagggacagtattctcagt

SEQ ID NO: 13673 - DNA, 20 bp, Artificial Sequence
  Description of Artificial Sequence: Synthetic oligonucleotide
  Target: APOC3; (+) strand; PAM type: YTN; PAM sequence: TTC
tcagtgctctcctaccccac

SEQ ID NO: 13674 - DNA, 20 bp, Artificial Sequence
  Description of Artificial Sequence: Synthetic oligonucleotide
  Target: APOC3; (+) strand; PAM type: YTN; PAM sequence: CTC
agtgctctcctaccccacct

SEQ ID NO: 13675 - DNA, 20 bp, Artificial Sequence
  Description of Artificial Sequence: Synthetic oligonucleotide
  Target: APOC3; (+) strand; PAM type: YTN; PAM sequence: CTC
tcctaccccacctcatgcct

SEQ ID NO: 13676 - DNA, 20 bp, Artificial Sequence
  Description of Artificial Sequence: Synthetic oligonucleotide
  Target: APOC3; (+) strand; PAM type: YTN; PAM sequence: CTC
ctaccccacctcatgcctgg

SEQ ID NO: 13677 - DNA, 20 bp, Artificial Sequence
  Description of Artificial Sequence: Synthetic oligonucleotide
  Target: APOC3; (+) strand; PAM type: YTN; PAM sequence: CTA
ccccacctcatgcctggccc

SEQ ID NO: 13678 - DNA, 20 bp, Artificial Sequence
  Description of Artificial Sequence: Synthetic oligonucleotide
  Target: APOC3; (+) strand; PAM type: YTN; PAM sequence: CTC
atgcctggcccccctccagg

SEQ ID NO: 13679 - DNA, 20 bp, Artificial Sequence
  Description of Artificial Sequence: Synthetic oligonucleotide
  Target: APOC3; (+) strand; PAM type: YTN; PAM sequence: CTG
gcccccctccaggcatgctg

SEQ ID NO: 13680 - DNA, 20 bp, Artificial Sequence
  Description of Artificial Sequence: Synthetic oligonucleotide
  Target: APOC3; (+) strand; PAM type: YTN; PAM sequence: CTC
caggcatgctggcctcccaa

SEQ ID NO: 13681 - DNA, 20 bp, Artificial Sequence
  Description of Artificial Sequence: Synthetic oligonucleotide
  Target: APOC3; (+) strand; PAM type: YTN; PAM sequence: CTG
gcctcccaataaagctggac

SEQ ID NO: 13682 - DNA, 20 bp, Artificial Sequence
  Description of Artificial Sequence: Synthetic oligonucleotide
  Target: APOC3; (+) strand; PAM type: YTN; PAM sequence: CTC
ccaataaagctggacaagaa

SEQ ID NO: 13683 - DNA, 20 bp, Artificial Sequence
  Description of Artificial Sequence: Synthetic oligonucleotide
  Target: APOC3; (+) strand; PAM type: YTN; PAM sequence: CTG
gacaagaagctgctatgagt

SEQ ID NO: 13684 - DNA, 20 bp, Artificial Sequence
  Description of Artificial Sequence: Synthetic oligonucleotide
  Target: APOC3; (+) strand; PAM type: YTN; PAM sequence: CTG
ctatgagtgggccgtcgcaa

SEQ ID NO: 13685 - DNA, 20 bp, Artificial Sequence
  Description of Artificial Sequence: Synthetic oligonucleotide
  Target: APOC3; (+) strand; PAM type: YTN; PAM sequence: CTA
tgagtgggccgtcgcaagtg

SEQ ID NO: 13686 - DNA, 20 bp, Artificial Sequence
  Description of Artificial Sequence: Synthetic oligonucleotide
  Target: APOC3; (+) strand; PAM type: YTN; PAM sequence: CTG
tgtctgggcatgggaaaggg

SEQ ID NO: 13687 - DNA, 20 bp, Artificial Sequence
  Description of Artificial Sequence: Synthetic oligonucleotide
  Target: APOC3; (+) strand; PAM type: YTN; PAM sequence: CTG
ggcatgggaaagggccgagg

SEQ ID NO: 13688 - DNA, 20 bp, Artificial Sequence
  Description of Artificial Sequence: Synthetic oligonucleotide
  Target: APOC3; (+) strand; PAM type: YTN; PAM sequence: CTG
ttctgtgggtgggcactgga

SEQ ID NO: 13689 - DNA, 20 bp, Artificial Sequence
  Description of Artificial Sequence: Synthetic oligonucleotide
  Target: APOC3; (+) strand; PAM type: YTN; PAM sequence: TTC
tgtgggtgggcactggacag

SEQ ID NO: 13690 - DNA, 20 bp, Artificial Sequence
  Description of Artificial Sequence: Synthetic oligonucleotide
  Target: APOC3; (+) strand; PAM type: YTN; PAM sequence: CTG
tgggtgggcactggacagac

SEQ ID NO: 13691 - DNA, 20 bp, Artificial Sequence
  Description of Artificial Sequence: Synthetic oligonucleotide
  Target: APOC3; (+) strand; PAM type: YTN; PAM sequence: CTG
gacagactccaggtcaggca

SEQ ID NO: 13692 - DNA, 20 bp, Artificial Sequence
  Description of Artificial Sequence: Synthetic oligonucleotide
  Target: APOC3; (+) strand; PAM type: YTN; PAM sequence: CTC
caggtcaggcaggcatggag

SEQ ID NO: 13693 - DNA, 20 bp, Artificial Sequence
  Description of Artificial Sequence: Synthetic oligonucleotide
  Target: APOC3; (+) strand; PAM type: YTN; PAM sequence: CTC
tatccaccttctggtagctg

SEQ ID NO: 13694 - DNA, 20 bp, Artificial Sequence
  Description of Artificial Sequence: Synthetic oligonucleotide
  Target: APOC3; (+) strand; PAM type: YTN; PAM sequence: CTA
tccaccttctggtagctggg

SEQ ID NO: 13695 - DNA, 20 bp, Artificial Sequence
  Description of Artificial Sequence: Synthetic oligonucleotide
  Target: APOC3; (+) strand; PAM type: YTN; PAM sequence: CTT
ctggtagctgggcagtctct

SEQ ID NO: 13696 - DNA, 20 bp, Artificial Sequence
  Description of Artificial Sequence: Synthetic oligonucleotide
  Target: APOC3; (+) strand; PAM type: YTN; PAM sequence: TTC
tggtagctgggcagtctctg

SEQ ID NO: 13697 - DNA, 20 bp, Artificial Sequence
  Description of Artificial Sequence: Synthetic oligonucleotide
  Target: APOC3; (+) strand; PAM type: YTN; PAM sequence: CTG
gtagctgggcagtctctggg

SEQ ID NO: 13698 - DNA, 20 bp, Artificial Sequence
  Description of Artificial Sequence: Synthetic oligonucleotide
  Target: APOC3; (+) strand; PAM type: YTN; PAM sequence: CTG
ggcagtctctgggcctcagt

SEQ ID NO: 13699 - DNA, 20 bp, Artificial Sequence
  Description of Artificial Sequence: Synthetic oligonucleotide
  Target: APOC3; (+) strand; PAM type: YTN; PAM sequence: CTC
tgggcctcagtttcttcatc

SEQ ID NO: 13700 - DNA, 20 bp, Artificial Sequence
  Description of Artificial Sequence: Synthetic oligonucleotide
  Target: APOC3; (+) strand; PAM type: YTN; PAM sequence: CTG
ggcctcagtttcttcatctc

SEQ ID NO: 13701 - DNA, 20 bp, Artificial Sequence
  Description of Artificial Sequence: Synthetic oligonucleotide
  Target: APOC3; (+) strand; PAM type: YTN; PAM sequence: CTC
agtttcttcatctctaaggt

SEQ ID NO: 13702 - DNA, 20 bp, Artificial Sequence
  Description of Artificial Sequence: Synthetic oligonucleotide
  Target: APOC3; (+) strand; PAM type: YTN; PAM sequence: TTT
cttcatctctaaggtaggaa

SEQ ID NO: 13703 - DNA, 20 bp, Artificial Sequence
  Description of Artificial Sequence: Synthetic oligonucleotide
  Target: APOC3; (+) strand; PAM type: YTN; PAM sequence: TTC
ttcatctctaaggtaggaat

SEQ ID NO: 13704 - DNA, 20 bp, Artificial Sequence
  Description of Artificial Sequence: Synthetic oligonucleotide
  Target: APOC3; (+) strand; PAM type: YTN; PAM sequence: CTT
catctctaaggtaggaatca

SEQ ID NO: 13705 - DNA, 20 bp, Artificial Sequence
  Description of Artificial Sequence: Synthetic oligonucleotide
  Target: APOC3; (+) strand; PAM type: YTN; PAM sequence: TTC
atctctaaggtaggaatcac

SEQ ID NO: 13706 - DNA, 20 bp, Artificial Sequence
  Description of Artificial Sequence: Synthetic oligonucleotide
  Target: APOC3; (+) strand; PAM type: YTN; PAM sequence: CTC
taaggtaggaatcaccctcc

SEQ ID NO: 13707 - DNA, 20 bp, Artificial Sequence
  Description of Artificial Sequence: Synthetic oligonucleotide
  Target: APOC3; (+) strand; PAM type: YTN; PAM sequence: CTA
aggtaggaatcaccctccgt

SEQ ID NO: 13708 - DNA, 20 bp, Artificial Sequence
  Description of Artificial Sequence: Synthetic oligonucleotide
  Target: APOC3; (+) strand; PAM type: YTN; PAM sequence: CTC
cgtaccctgccttccttgac

SEQ ID NO: 13709 - DNA, 20 bp, Artificial Sequence
  Description of Artificial Sequence: Synthetic oligonucleotide
  Target: APOC3; (+) strand; PAM type: YTN; PAM sequence: CTG
ccttccttgacagctttgtg

SEQ ID NO: 13710 - DNA, 20 bp, Artificial Sequence
  Description of Artificial Sequence: Synthetic oligonucleotide
  Target: APOC3; (+) strand; PAM type: YTN; PAM sequence: CTT
ccttgacagctttgtgcgga

SEQ ID NO: 13711 - DNA, 20 bp, Artificial Sequence
  Description of Artificial Sequence: Synthetic oligonucleotide
  Target: APOC3; (+) strand; PAM type: YTN; PAM sequence: TTC
cttgacagctttgtgcggaa

SEQ ID NO: 13712 - DNA, 20 bp, Artificial Sequence
  Description of Artificial Sequence: Synthetic oligonucleotide
  Target: APOC3; (+) strand; PAM type: YTN; PAM sequence: CTT
gacagctttgtgcggaaggt

SEQ ID NO: 13713 - DNA, 20 bp, Artificial Sequence
  Description of Artificial Sequence: Synthetic oligonucleotide
  Target: APOC3; (+) strand; PAM type: YTN; PAM sequence: TTG
acagctttgtgcggaaggtc

SEQ ID NO: 13714 - DNA, 20 bp, Artificial Sequence
  Description of Artificial Sequence: Synthetic oligonucleotide
  Target: APOC3; (+) strand; PAM type: YTN; PAM sequence: CTT
tgtgcggaaggtcaaacagg

SEQ ID NO: 13715 - DNA, 20 bp, Artificial Sequence
  Description of Artificial Sequence: Synthetic oligonucleotide
  Target: APOC3; (+) strand; PAM type: YTN; PAM sequence: TTT
gtgcggaaggtcaaacagga

SEQ ID NO: 13716 - DNA, 20 bp, Artificial Sequence
  Description of Artificial Sequence: Synthetic oligonucleotide
  Target: APOC3; (+) strand; PAM type: YTN; PAM sequence: TTG
tgcggaaggtcaaacaggac

SEQ ID NO: 13717 - DNA, 20 bp, Artificial Sequence
  Description of Artificial Sequence: Synthetic oligonucleotide
  Target: APOC3; (+) strand; PAM type: YTN; PAM sequence: TTT
gctgatactttgataaactg

SEQ ID NO: 13718 - DNA, 20 bp, Artificial Sequence
  Description of Artificial Sequence: Synthetic oligonucleotide
  Target: APOC3; (+) strand; PAM type: YTN; PAM sequence: TTG
ctgatactttgataaactgt

SEQ ID NO: 13719 - DNA, 20 bp, Artificial Sequence
  Description of Artificial Sequence: Synthetic oligonucleotide
  Target: APOC3; (+) strand; PAM type: YTN; PAM sequence: CTG
atactttgataaactgttag

SEQ ID NO: 13720 - DNA, 20 bp, Artificial Sequence
  Description of Artificial Sequence: Synthetic oligonucleotide
  Target: APOC3; (+) strand; PAM type: YTN; PAM sequence: CTT
tgataaactgttaggtgctg

SEQ ID NO: 13721 - DNA, 20 bp, Artificial Sequence
  Description of Artificial Sequence: Synthetic oligonucleotide
  Target: APOC3; (+) strand; PAM type: YTN; PAM sequence: TTT
gataaactgttaggtgctgc

SEQ ID NO: 13722 - DNA, 20 bp, Artificial Sequence
  Description of Artificial Sequence: Synthetic oligonucleotide
  Target: APOC3; (+) strand; PAM type: YTN; PAM sequence: TTG
ataaactgttaggtgctgca

SEQ ID NO: 13723 - DNA, 20 bp, Artificial Sequence
  Description of Artificial Sequence: Synthetic oligonucleotide
  Target: APOC3; (+) strand; PAM type: YTN; PAM sequence: CTG
ttaggtgctgcacaacatga

SEQ ID NO: 13724 - DNA, 20 bp, Artificial Sequence
  Description of Artificial Sequence: Synthetic oligonucleotide
  Target: APOC3; (+) strand; PAM type: YTN; PAM sequence: TTA
ggtgctgcacaacatgactt

SEQ ID NO: 13725 - DNA, 20 bp, Artificial Sequence
  Description of Artificial Sequence: Synthetic oligonucleotide
  Target: APOC3; (+) strand; PAM type: YTN; PAM sequence: CTG
cacaacatgacttgagtgtg

SEQ ID NO: 13726 - DNA, 20 bp, Artificial Sequence
  Description of Artificial Sequence: Synthetic oligonucleotide
  Target: APOC3; (+) strand; PAM type: YTN; PAM sequence: CTT
gagtgtgtgccccatgccag

SEQ ID NO: 13727 - DNA, 20 bp, Artificial Sequence
  Description of Artificial Sequence: Synthetic oligonucleotide
  Target: APOC3; (+) strand; PAM type: YTN; PAM sequence: TTG
agtgtgtgccccatgccagc

SEQ ID NO: 13728 - DNA, 20 bp, Artificial Sequence
  Description of Artificial Sequence: Synthetic oligonucleotide
  Target: APOC3; (+) strand; PAM type: YTN; PAM sequence: CTA
tgcctggcacttaagttgtc

SEQ ID NO: 13729 - DNA, 20 bp, Artificial Sequence
  Description of Artificial Sequence: Synthetic oligonucleotide
  Target: APOC3; (+) strand; PAM type: YTN; PAM sequence: CTG
gcacttaagttgtcatcaga

SEQ ID NO: 13730 - DNA, 20 bp, Artificial Sequence
  Description of Artificial Sequence: Synthetic oligonucleotide
  Target: APOC3; (+) strand; PAM type: YTN; PAM sequence: CTT
aagttgtcatcagagttgag

SEQ ID NO: 13731 - DNA, 20 bp, Artificial Sequence
  Description of Artificial Sequence: Synthetic oligonucleotide
  Target: APOC3; (+) strand; PAM type: YTN; PAM sequence: TTA
agttgtcatcagagttgaga

SEQ ID NO: 13732 - DNA, 20 bp, Artificial Sequence
  Description of Artificial Sequence: Synthetic oligonucleotide
  Target: APOC3; (+) strand; PAM type: YTN; PAM sequence: TTG
tcatcagagttgagactgtg

SEQ ID NO: 13733 - DNA, 20 bp, Artificial Sequence
  Description of Artificial Sequence: Synthetic oligonucleotide
  Target: APOC3; (+) strand; PAM type: YTN; PAM sequence: TTG
agactgtgtgtgtttactca

SEQ ID NO: 13734 - DNA, 20 bp, Artificial Sequence
  Description of Artificial Sequence: Synthetic oligonucleotide
  Target: APOC3; (+) strand; PAM type: YTN; PAM sequence: CTG
tgtgtgtttactcaaaactg

SEQ ID NO: 13735 - DNA, 20 bp, Artificial Sequence
  Description of Artificial Sequence: Synthetic oligonucleotide
  Target: APOC3; (+) strand; PAM type: YTN; PAM sequence: TTT
actcaaaactgtggagctga

SEQ ID NO: 13736 - DNA, 20 bp, Artificial Sequence
  Description of Artificial Sequence: Synthetic oligonucleotide
  Target: APOC3; (+) strand; PAM type: YTN; PAM sequence: TTA
ctcaaaactgtggagctgac

SEQ ID NO: 13737 - DNA, 20 bp, Artificial Sequence
  Description of Artificial Sequence: Synthetic oligonucleotide
  Target: APOC3; (+) strand; PAM type: YTN; PAM sequence: CTC
aaaactgtggagctgacctc

SEQ ID NO: 13738 - DNA, 20 bp, Artificial Sequence
  Description of Artificial Sequence: Synthetic oligonucleotide
  Target: APOC3; (+) strand; PAM type: YTN; PAM sequence: CTG
tggagctgacctcccctatc

SEQ ID NO: 13739 - DNA, 20 bp, Artificial Sequence
  Description of Artificial Sequence: Synthetic oligonucleotide
  Target: APOC3; (+) strand; PAM type: YTN; PAM sequence: CTG
acctcccctatccaggcccc

SEQ ID NO: 13740 - DNA, 20 bp, Artificial Sequence
  Description of Artificial Sequence: Synthetic oligonucleotide
  Target: APOC3; (+) strand; PAM type: YTN; PAM sequence: CTC
ccctatccaggccccctagc

SEQ ID NO: 13741 - DNA, 20 bp, Artificial Sequence
  Description of Artificial Sequence: Synthetic oligonucleotide
  Target: APOC3; (+) strand; PAM type: YTN; PAM sequence: CTA
tccaggccccctagccctct

SEQ ID NO: 13742 - DNA, 20 bp, Artificial Sequence
  Description of Artificial Sequence: Synthetic oligonucleotide
  Target: APOC3; (+) strand; PAM type: YTN; PAM sequence: CTA
gccctcttaggcgcacgtga

SEQ ID NO: 13743 - DNA, 20 bp, Artificial Sequence
  Description of Artificial Sequence: Synthetic oligonucleotide
  Target: APOC3; (+) strand; PAM type: YTN; PAM sequence: CTC
ttaggcgcacgtgaagggag

SEQ ID NO: 13744 - DNA, 20 bp, Artificial Sequence
  Description of Artificial Sequence: Synthetic oligonucleotide
  Target: APOC3; (+) strand; PAM type: YTN; PAM sequence: CTT
aggcgcacgtgaagggagga

SEQ ID NO: 13745 - DNA, 20 bp, Artificial Sequence
  Description of Artificial Sequence: Synthetic oligonucleotide
  Target: APOC3; (+) strand; PAM type: YTN; PAM sequence: TTA
ggcgcacgtgaagggaggag

SEQ ID NO: 13746 - DNA, 20 bp, Artificial Sequence
  Description of Artificial Sequence: Synthetic oligonucleotide
  Target: APOC3; (+) strand; PAM type: YTN; PAM sequence: CTA
gaggttggagtaagatgcaa

SEQ ID NO: 13747 - DNA, 20 bp, Artificial Sequence
  Description of Artificial Sequence: Synthetic oligonucleotide
  Target: APOC3; (+) strand; PAM type: YTN; PAM sequence: TTG
gagtaagatgcaacgaggca

SEQ ID NO: 13748 - DNA, 20 bp, Artificial Sequence
  Description of Artificial Sequence: Synthetic oligonucleotide
  Target: APOC3; (+) strand; PAM type: YTN; PAM sequence: CTA
ttcttggctccaccacttga

SEQ ID NO: 13749 - DNA, 20 bp, Artificial Sequence
  Description of Artificial Sequence: Synthetic oligonucleotide
  Target: APOC3; (+) strand; PAM type: YTN; PAM sequence: TTC
ttggctccaccacttgatat

SEQ ID NO: 13750 - DNA, 20 bp, Artificial Sequence
  Description of Artificial Sequence: Synthetic oligonucleotide
  Target: APOC3; (+) strand; PAM type: YTN; PAM sequence: CTT
ggctccaccacttgatatca

SEQ ID NO: 13751 - DNA, 20 bp, Artificial Sequence
  Description of Artificial Sequence: Synthetic oligonucleotide
  Target: APOC3; (+) strand; PAM type: YTN; PAM sequence: TTG
gctccaccacttgatatcag

SEQ ID NO: 13752 - DNA, 20 bp, Artificial Sequence
  Description of Artificial Sequence: Synthetic oligonucleotide
  Target: APOC3; (+) strand; PAM type: YTN; PAM sequence: CTC
caccacttgatatcagcctc

SEQ ID NO: 13753 - DNA, 20 bp, Artificial Sequence
  Description of Artificial Sequence: Synthetic oligonucleotide
  Target: APOC3; (+) strand; PAM type: YTN; PAM sequence: CTT
gatatcagcctcagtttctt

SEQ ID NO: 13754 - DNA, 20 bp, Artificial Sequence
  Description of Artificial Sequence: Synthetic oligonucleotide
  Target: APOC3; (+) strand; PAM type: YTN; PAM sequence: TTG
atatcagcctcagtttctta

SEQ ID NO: 13755 - DNA, 20 bp, Artificial Sequence
  Description of Artificial Sequence: Synthetic oligonucleotide
  Target: APOC3; (+) strand; PAM type: YTN; PAM sequence: CTC
agtttcttacatgtaaagtg

SEQ ID NO: 13756 - DNA, 20 bp, Artificial Sequence
  Description of Artificial Sequence: Synthetic oligonucleotide
  Target: APOC3; (+) strand; PAM type: YTN; PAM sequence: TTT
cttacatgtaaagtggatac

SEQ ID NO: 13757 - DNA, 20 bp, Artificial Sequence
  Description of Artificial Sequence: Synthetic oligonucleotide
  Target: APOC3; (+) strand; PAM type: YTN; PAM sequence: TTC
ttacatgtaaagtggataca

SEQ ID NO: 13758 - DNA, 20 bp, Artificial Sequence
  Description of Artificial Sequence: Synthetic oligonucleotide
  Target: APOC3; (+) strand; PAM type: YTN; PAM sequence: CTT
acatgtaaagtggatacaac

SEQ ID NO: 13759 - DNA, 20 bp, Artificial Sequence
  Description of Artificial Sequence: Synthetic oligonucleotide
  Target: APOC3; (+) strand; PAM type: YTN; PAM sequence: TTA
catgtaaagtggatacaacc

SEQ ID NO: 13760 - DNA, 20 bp, Artificial Sequence
  Description of Artificial Sequence: Synthetic oligonucleotide
  Target: APOC3; (+) strand; PAM type: YTN; PAM sequence: CTC
caccgtaggtttgccgtgag

SEQ ID NO: 13761 - DNA, 20 bp, Artificial Sequence
  Description of Artificial Sequence: Synthetic oligonucleotide
  Target: APOC3; (+) strand; PAM type: YTN; PAM sequence: TTT
gccgtgagattgaaatgaga

SEQ ID NO: 13762 - DNA, 20 bp, Artificial Sequence
  Description of Artificial Sequence: Synthetic oligonucleotide
  Target: APOC3; (+) strand; PAM type: YTN; PAM sequence: TTG
ccgtgagattgaaatgagag

SEQ ID NO: 13763 - DNA, 20 bp, Artificial Sequence
  Description of Artificial Sequence: Synthetic oligonucleotide
  Target: APOC3; (+) strand; PAM type: YTN; PAM sequence: TTG
aaatgagagagcgttcgaac

SEQ ID NO: 13764 - DNA, 20 bp, Artificial Sequence
  Description of Artificial Sequence: Synthetic oligonucleotide
  Target: APOC3; (+) strand; PAM type: YTN; PAM sequence: TTC
gaaccgtttggcacagcacc

SEQ ID NO: 13765 - DNA, 20 bp, Artificial Sequence
  Description of Artificial Sequence: Synthetic oligonucleotide
  Target: APOC3; (+) strand; PAM type: YTN; PAM sequence: TTT
ggcacagcacctgcacgtaa

SEQ ID NO: 13766 - DNA, 20 bp, Artificial Sequence
  Description of Artificial Sequence: Synthetic oligonucleotide
  Target: APOC3; (+) strand; PAM type: YTN; PAM sequence: TTG
gcacagcacctgcacgtaaa

SEQ ID NO: 13767 - DNA, 20 bp, Artificial Sequence
  Description of Artificial Sequence: Synthetic oligonucleotide
  Target: APOC3; (+) strand; PAM type: YTN; PAM sequence: CTG
cacgtaaagatgcttgatca

SEQ ID NO: 13768 - DNA, 20 bp, Artificial Sequence
  Description of Artificial Sequence: Synthetic oligonucleotide
  Target: APOC3; (+) strand; PAM type: YTN; PAM sequence: CTT
gatcaatgttgtcatgatta

SEQ ID NO: 13769 - DNA, 20 bp, Artificial Sequence
  Description of Artificial Sequence: Synthetic oligonucleotide
  Target: APOC3; (+) strand; PAM type: YTN; PAM sequence: TTG
atcaatgttgtcatgattac

SEQ ID NO: 13770 - DNA, 20 bp, Artificial Sequence
  Description of Artificial Sequence: Synthetic oligonucleotide
  Target: APOC3; (+) strand; PAM type: YTN; PAM sequence: TTG
tcatgattacagttgagctg

SEQ ID NO: 13771 - DNA, 20 bp, Artificial Sequence
  Description of Artificial Sequence: Synthetic oligonucleotide
  Target: APOC3; (+) strand; PAM type: YTN; PAM sequence: TTA
cagttgagctgactgggccc

SEQ ID NO: 13772 - DNA, 20 bp, Artificial Sequence
  Description of Artificial Sequence: Synthetic oligonucleotide
  Target: APOC3; (+) strand; PAM type: YTN; PAM sequence: TTG
agctgactgggcccttggga

SEQ ID NO: 13773 - DNA, 20 bp, Artificial Sequence
  Description of Artificial Sequence: Synthetic oligonucleotide
  Target: APOC3; (+) strand; PAM type: YTN; PAM sequence: CTG
actgggcccttgggacccgg

SEQ ID NO: 13774 - DNA, 20 bp, Artificial Sequence
  Description of Artificial Sequence: Synthetic oligonucleotide
  Target: APOC3; (+) strand; PAM type: YTN; PAM sequence: CTG
ggcccttgggacccggactg

SEQ ID NO: 13775 - DNA, 20 bp, Artificial Sequence
  Description of Artificial Sequence: Synthetic oligonucleotide
  Target: APOC3; (+) strand; PAM type: YTN; PAM sequence: CTT
gggacccggactggagtggt

SEQ ID NO: 13776 - DNA, 20 bp, Artificial Sequence
  Description of Artificial Sequence: Synthetic oligonucleotide
  Target: APOC3; (+) strand; PAM type: YTN; PAM sequence: TTG
ggacccggactggagtggtg

SEQ ID NO: 13777 - DNA, 20 bp, Artificial Sequence
  Description of Artificial Sequence: Synthetic oligonucleotide
  Target: APOC3; (+) strand; PAM type: YTN; PAM sequence: CTG
gagtggtggggggcagtgtc

SEQ ID NO: 13778 - DNA, 20 bp, Artificial Sequence
  Description of Artificial Sequence: Synthetic oligonucleotide
  Target: APOC3; (+) strand; PAM type: YTN; PAM sequence: CTG
ggaccaaaaagaagcacaag

SEQ ID NO: 13779 - DNA, 20 bp, Artificial Sequence
  Description of Artificial Sequence: Synthetic oligonucleotide
  Target: APOC3; (+) strand; PAM type: YTN; PAM sequence: CTC
ccaatagaggctgcttcctt

SEQ ID NO: 13780 - DNA, 20 bp, Artificial Sequence
  Description of Artificial Sequence: Synthetic oligonucleotide
  Target: APOC3; (+) strand; PAM type: YTN; PAM sequence: CTG
cttcctttgtgtccccacca

SEQ ID NO: 13781 - DNA, 20 bp, Artificial Sequence
  Description of Artificial Sequence: Synthetic oligonucleotide
  Target: APOC3; (+) strand; PAM type: YTN; PAM sequence: CTT
cctttgtgtccccaccaccc

SEQ ID NO: 13782 - DNA, 20 bp, Artificial Sequence
  Description of Artificial Sequence: Synthetic oligonucleotide
  Target: APOC3; (+) strand; PAM type: YTN; PAM sequence: TTC
ctttgtgtccccaccacccg

SEQ ID NO: 13783 - DNA, 20 bp, Artificial Sequence
  Description of Artificial Sequence: Synthetic oligonucleotide
  Target: APOC3; (+) strand; PAM type: YTN; PAM sequence: CTT
tgtgtccccaccacccgaaa

SEQ ID NO: 13784 - DNA, 20 bp, Artificial Sequence
  Description of Artificial Sequence: Synthetic oligonucleotide
  Target: APOC3; (+) strand; PAM type: YTN; PAM sequence: TTT
gtgtccccaccacccgaaag

SEQ ID NO: 13785 - DNA, 20 bp, Artificial Sequence
  Description of Artificial Sequence: Synthetic oligonucleotide
  Target: APOC3; (+) strand; PAM type: YTN; PAM sequence: TTG
tgtccccaccacccgaaaga

SEQ ID NO: 13786 - DNA, 20 bp, Artificial Sequence
  Description of Artificial Sequence: Synthetic oligonucleotide
  Target: APOC3; (+) strand; PAM type: YTN; PAM sequence: CTG
cagatggcttgagtagggct

SEQ ID NO: 13787 - DNA, 20 bp, Artificial Sequence
  Description of Artificial Sequence: Synthetic oligonucleotide
  Target: APOC3; (+) strand; PAM type: YTN; PAM sequence: CTT
gagtagggctccactcttca

SEQ ID NO: 13788 - DNA, 20 bp, Artificial Sequence
  Description of Artificial Sequence: Synthetic oligonucleotide
  Target: APOC3; (+) strand; PAM type: YTN; PAM sequence: TTG
agtagggctccactcttcag

SEQ ID NO: 13789 - DNA, 20 bp, Artificial Sequence
  Description of Artificial Sequence: Synthetic oligonucleotide
  Target: APOC3; (+) strand; PAM type: YTN; PAM sequence: CTC
cactcttcagatcaaaaaac

SEQ ID NO: 13790 - DNA, 20 bp, Artificial Sequence
  Description of Artificial Sequence: Synthetic oligonucleotide
  Target: APOC3; (+) strand; PAM type: YTN; PAM sequence: CTC
ttcagatcaaaaaactgtgg

SEQ ID NO: 13791 - DNA, 20 bp, Artificial Sequence
  Description of Artificial Sequence: Synthetic oligonucleotide
  Target: APOC3; (+) strand; PAM type: YTN; PAM sequence: CTT
cagatcaaaaaactgtggcc

SEQ ID NO: 13792 - DNA, 20 bp, Artificial Sequence
  Description of Artificial Sequence: Synthetic oligonucleotide
  Target: APOC3; (+) strand; PAM type: YTN; PAM sequence: TTC
agatcaaaaaactgtggccc

SEQ ID NO: 13793 - DNA, 20 bp, Artificial Sequence
  Description of Artificial Sequence: Synthetic oligonucleotide
  Target: APOC3; (+) strand; PAM type: YTN; PAM sequence: CTG
tggcccggagaggcgaaggc

SEQ ID NO: 13794 - DNA, 20 bp, Artificial Sequence
  Description of Artificial Sequence: Synthetic oligonucleotide
  Target: APOC3; (+) strand; PAM type: YTN; PAM sequence: CTT
ggccagcatcacagagccag

SEQ ID NO: 13795 - DNA, 20 bp, Artificial Sequence
  Description of Artificial Sequence: Synthetic oligonucleotide
  Target: APOC3; (+) strand; PAM type: YTN; PAM sequence: TTG
gccagcatcacagagccagc

SEQ ID NO: 13796 - DNA, 20 bp, Artificial Sequence
  Description of Artificial Sequence: Synthetic oligonucleotide
  Target: APOC3; (+) strand; PAM type: YTN; PAM sequence: CTT
gagcccaggtcagctgcgtg

SEQ ID NO: 13797 - DNA, 20 bp, Artificial Sequence
  Description of Artificial Sequence: Synthetic oligonucleotide
  Target: APOC3; (+) strand; PAM type: YTN; PAM sequence: TTG
agcccaggtcagctgcgtgt

SEQ ID NO: 13798 - DNA, 20 bp, Artificial Sequence
  Description of Artificial Sequence: Synthetic oligonucleotide
  Target: APOC3; (+) strand; PAM type: YTN; PAM sequence: CTG
cgtgtattctgctcagttgg

SEQ ID NO: 13799 - DNA, 20 bp, Artificial Sequence
  Description of Artificial Sequence: Synthetic oligonucleotide
  Target: APOC3; (+) strand; PAM type: YTN; PAM sequence: TTC
tgctcagttggtgcagaaaa

SEQ ID NO: 13800 - DNA, 20 bp, Artificial Sequence
  Description of Artificial Sequence: Synthetic oligonucleotide
  Target: APOC3; (+) strand; PAM type: YTN; PAM sequence: CTG
ctcagttggtgcagaaaaca

SEQ ID NO: 13801 - DNA, 20 bp, Artificial Sequence
  Description of Artificial Sequence: Synthetic oligonucleotide
  Target: APOC3; (+) strand; PAM type: YTN; PAM sequence: CTC
agttggtgcagaaaacagtt

SEQ ID NO: 13802 - DNA, 20 bp, Artificial Sequence
  Description of Artificial Sequence: Synthetic oligonucleotide
  Target: APOC3; (+) strand; PAM type: YTN; PAM sequence: TTG
gtgcagaaaacagttttgtc

SEQ ID NO: 13803 - DNA, 20 bp, Artificial Sequence
  Description of Artificial Sequence: Synthetic oligonucleotide
  Target: APOC3; (+) strand; PAM type: YTN; PAM sequence: TTT
tgtcactcctatgtcaggtg

SEQ ID NO: 13804 - DNA, 20 bp, Artificial Sequence
  Description of Artificial Sequence: Synthetic oligonucleotide
  Target: APOC3; (+) strand; PAM type: YTN; PAM sequence: TTT
gtcactcctatgtcaggtgt

SEQ ID NO: 13805 - DNA, 20 bp, Artificial Sequence
  Description of Artificial Sequence: Synthetic oligonucleotide
  Target: APOC3; (+) strand; PAM type: YTN; PAM sequence: TTG
tcactcctatgtcaggtgtt

SEQ ID NO: 13806 - DNA, 20 bp, Artificial Sequence
  Description of Artificial Sequence: Synthetic oligonucleotide
  Target: APOC3; (+) strand; PAM type: YTN; PAM sequence: CTC
ctatgtcaggtgttagggac

SEQ ID NO: 13807 - DNA, 20 bp, Artificial Sequence
  Description of Artificial Sequence: Synthetic oligonucleotide
  Target: APOC3; (+) strand; PAM type: YTN; PAM sequence: CTA
tgtcaggtgttagggactcc

SEQ ID NO: 13808 - DNA, 20 bp, Artificial Sequence
  Description of Artificial Sequence: Synthetic oligonucleotide
  Target: APOC3; (+) strand; PAM type: YTN; PAM sequence: TTA
gggactcctttacagatctc

SEQ ID NO: 13809 - DNA, 20 bp, Artificial Sequence
  Description of Artificial Sequence: Synthetic oligonucleotide
  Target: APOC3; (+) strand; PAM type: YTN; PAM sequence: CTC
ctttacagatctcagtggca

SEQ ID NO: 13810 - DNA, 20 bp, Artificial Sequence
  Description of Artificial Sequence: Synthetic oligonucleotide
  Target: APOC3; (+) strand; PAM type: YTN; PAM sequence: CTT
tacagatctcagtggcatca

SEQ ID NO: 13811 - DNA, 20 bp, Artificial Sequence
  Description of Artificial Sequence: Synthetic oligonucleotide
  Target: APOC3; (+) strand; PAM type: YTN; PAM sequence: TTT
acagatctcagtggcatcag

SEQ ID NO: 13812 - DNA, 20 bp, Artificial Sequence
  Description of Artificial Sequence: Synthetic oligonucleotide
  Target: APOC3; (+) strand; PAM type: YTN; PAM sequence: TTA
cagatctcagtggcatcagt

SEQ ID NO: 13813 - DNA, 20 bp, Artificial Sequence
  Description of Artificial Sequence: Synthetic oligonucleotide
  Target: APOC3; (+) strand; PAM type: YTN; PAM sequence: CTC
agtggcatcagtacatccag

SEQ ID NO: 13814 - DNA, 20 bp, Artificial Sequence
  Description of Artificial Sequence: Synthetic oligonucleotide
  Target: APOC3; (+) strand; PAM type: YTN; PAM sequence: CTG
gagactgctttctctctgaa

SEQ ID NO: 13815 - DNA, 20 bp, Artificial Sequence
  Description of Artificial Sequence: Synthetic oligonucleotide
  Target: APOC3; (+) strand; PAM type: YTN; PAM sequence: CTG
ctttctctctgaaaattccc

SEQ ID NO: 13816 - DNA, 20 bp, Artificial Sequence
  Description of Artificial Sequence: Synthetic oligonucleotide
  Target: APOC3; (+) strand; PAM type: YTN; PAM sequence: CTT
tctctctgaaaattccccag

SEQ ID NO: 13817 - DNA, 20 bp, Artificial Sequence
  Description of Artificial Sequence: Synthetic oligonucleotide
  Target: APOC3; (+) strand; PAM type: YTN; PAM sequence: TTT
ctctctgaaaattccccagg

SEQ ID NO: 13818 - DNA, 20 bp, Artificial Sequence
  Description of Artificial Sequence: Synthetic oligonucleotide
  Target: APOC3; (+) strand; PAM type: YTN; PAM sequence: TTC
tctctgaaaattccccaggg

SEQ ID NO: 13819 - DNA, 20 bp, Artificial Sequence
  Description of Artificial Sequence: Synthetic oligonucleotide
  Target: APOC3; (+) strand; PAM type: YTN; PAM sequence: CTC
tctgaaaattccccagggct

SEQ ID NO: 13820 - DNA, 20 bp, Artificial Sequence
  Description of Artificial Sequence: Synthetic oligonucleotide
  Target: APOC3; (+) strand; PAM type: YTN; PAM sequence: CTC
tgaaaattccccagggcttc

SEQ ID NO: 13821 - DNA, 20 bp, Artificial Sequence
  Description of Artificial Sequence: Synthetic oligonucleotide
  Target: APOC3; (+) strand; PAM type: YTN; PAM sequence: CTG
aaaattccccagggcttctc

SEQ ID NO: 13822 - DNA, 20 bp, Artificial Sequence
  Description of Artificial Sequence: Synthetic oligonucleotide
  Target: APOC3; (+) strand; PAM type: YTN; PAM sequence: TTC
cccagggcttctctctgggc

SEQ ID NO: 13823 - DNA, 20 bp, Artificial Sequence
  Description of Artificial Sequence: Synthetic oligonucleotide
  Target: APOC3; (+) strand; PAM type: YTN; PAM sequence: CTT
ctctctgggctgagagatct

SEQ ID NO: 13824 - DNA, 20 bp, Artificial Sequence
  Description of Artificial Sequence: Synthetic oligonucleotide
  Target: APOC3; (+) strand; PAM type: YTN; PAM sequence: TTC
tctctgggctgagagatctc

SEQ ID NO: 13825 - DNA, 20 bp, Artificial Sequence
  Description of Artificial Sequence: Synthetic oligonucleotide
  Target: APOC3; (+) strand; PAM type: YTN; PAM sequence: CTC
tctgggctgagagatctcag

SEQ ID NO: 13826 - DNA, 20 bp, Artificial Sequence
  Description of Artificial Sequence: Synthetic oligonucleotide
  Target: APOC3; (+) strand; PAM type: YTN; PAM sequence: CTC
tgggctgagagatctcagca

SEQ ID NO: 13827 - DNA, 20 bp, Artificial Sequence
  Description of Artificial Sequence: Synthetic oligonucleotide
  Target: APOC3; (+) strand; PAM type: YTN; PAM sequence: CTG
ggctgagagatctcagcacc

SEQ ID NO: 13828 - DNA, 20 bp, Artificial Sequence
  Description of Artificial Sequence: Synthetic oligonucleotide
  Target: APOC3; (+) strand; PAM type: YTN; PAM sequence: CTG
agagatctcagcacccgtat

SEQ ID NO: 13829 - DNA, 20 bp, Artificial Sequence
  Description of Artificial Sequence: Synthetic oligonucleotide
  Target: APOC3; (+) strand; PAM type: YTN; PAM sequence: CTC
agcacccgtatctagaaaat

SEQ ID NO: 13830 - DNA, 20 bp, Artificial Sequence
  Description of Artificial Sequence: Synthetic oligonucleotide
  Target: APOC3; (+) strand; PAM type: YTN; PAM sequence: CTA
gaaaatgttcccacccagac

SEQ ID NO: 13831 - DNA, 20 bp, Artificial Sequence
  Description of Artificial Sequence: Synthetic oligonucleotide
  Target: APOC3; (+) strand; PAM type: YTN; PAM sequence: TTC
ccacccagacctggctggat

SEQ ID NO: 13832 - DNA, 20 bp, Artificial Sequence
  Description of Artificial Sequence: Synthetic oligonucleotide
  Target: APOC3; (+) strand; PAM type: YTN; PAM sequence: CTG
gctggatgactgctgttgta

SEQ ID NO: 13833 - DNA, 20 bp, Artificial Sequence
  Description of Artificial Sequence: Synthetic oligonucleotide
  Target: APOC3; (+) strand; PAM type: YTN; PAM sequence: CTG
gatgactgctgttgtagctc

SEQ ID NO: 13834 - DNA, 20 bp, Artificial Sequence
  Description of Artificial Sequence: Synthetic oligonucleotide
  Target: APOC3; (+) strand; PAM type: YTN; PAM sequence: CTG
ctgttgtagctctggaaggt

SEQ ID NO: 13835 - DNA, 20 bp, Artificial Sequence
  Description of Artificial Sequence: Synthetic oligonucleotide
  Target: APOC3; (+) strand; PAM type: YTN; PAM sequence: CTG
ttgtagctctggaaggttag

SEQ ID NO: 13836 - DNA, 20 bp, Artificial Sequence
  Description of Artificial Sequence: Synthetic oligonucleotide
  Target: APOC3; (+) strand; PAM type: YTN; PAM sequence: TTG
tagctctggaaggttaggaa

SEQ ID NO: 13837 - DNA, 20 bp, Artificial Sequence
  Description of Artificial Sequence: Synthetic oligonucleotide
  Target: APOC3; (+) strand; PAM type: YTN; PAM sequence: CTC
tggaaggttaggaactaaaa

SEQ ID NO: 13838 - DNA, 20 bp, Artificial Sequence
  Description of Artificial Sequence: Synthetic oligonucleotide
  Target: APOC3; (+) strand; PAM type: YTN; PAM sequence: CTG
gaaggttaggaactaaaaag

SEQ ID NO: 13839 - DNA, 20 bp, Artificial Sequence
  Description of Artificial Sequence: Synthetic oligonucleotide
  Target: APOC3; (+) strand; PAM type: YTN; PAM sequence: TTA
ggaactaaaaagcccactcc

SEQ ID NO: 13840 - DNA, 20 bp, Artificial Sequence
  Description of Artificial Sequence: Synthetic oligonucleotide
  Target: APOC3; (+) strand; PAM type: YTN; PAM sequence: CTA
aaaagcccactcctttacct

SEQ ID NO: 13841 - DNA, 20 bp, Artificial Sequence
  Description of Artificial Sequence: Synthetic oligonucleotide
  Target: APOC3; (+) strand; PAM type: YTN; PAM sequence: CTC
ctttacctagggtagctaag

SEQ ID NO: 13842 - DNA, 20 bp, Artificial Sequence
  Description of Artificial Sequence: Synthetic oligonucleotide
  Target: APOC3; (+) strand; PAM type: YTN; PAM sequence: CTT
tacctagggtagctaagata

SEQ ID NO: 13843 - DNA, 20 bp, Artificial Sequence
  Description of Artificial Sequence: Synthetic oligonucleotide
  Target: APOC3; (+) strand; PAM type: YTN; PAM sequence: TTT
acctagggtagctaagatac

SEQ ID NO: 13844 - DNA, 20 bp, Artificial Sequence
  Description of Artificial Sequence: Synthetic oligonucleotide
  Target: APOC3; (+) strand; PAM type: YTN; PAM sequence: TTA
cctagggtagctaagataca

SEQ ID NO: 13845 - DNA, 20 bp, Artificial Sequence
  Description of Artificial Sequence: Synthetic oligonucleotide
  Target: APOC3; (+) strand; PAM type: YTN; PAM sequence: CTA
gggtagctaagatacactgg

SEQ ID NO: 13846 - DNA, 20 bp, Artificial Sequence
  Description of Artificial Sequence: Synthetic oligonucleotide
  Target: APOC3; (+) strand; PAM type: YTN; PAM sequence: CTA
agatacactggagatgggga

SEQ ID NO: 13847 - DNA, 20 bp, Artificial Sequence
  Description of Artificial Sequence: Synthetic oligonucleotide
  Target: APOC3; (+) strand; PAM type: YTN; PAM sequence: CTG
gagatggggacatggggatg

SEQ ID NO: 13848 - DNA, 20 bp, Artificial Sequence
  Description of Artificial Sequence: Synthetic oligonucleotide
  Target: APOC3; (+) strand; PAM type: YTN; PAM sequence: TTA
tccaggggcctgcatgaggg

SEQ ID NO: 13849 - DNA, 20 bp, Artificial Sequence
  Description of Artificial Sequence: Synthetic oligonucleotide
  Target: APOC3; (+) strand; PAM type: YTN; PAM sequence: CTG
catgagggggcaaaaggccc

SEQ ID NO: 13850 - DNA, 20 bp, Artificial Sequence
  Description of Artificial Sequence: Synthetic oligonucleotide
  Target: APOC3; (+) strand; PAM type: YTN; PAM sequence: CTG
cagagagagggtagggaagg

SEQ ID NO: 13851 - DNA, 20 bp, Artificial Sequence
  Description of Artificial Sequence: Synthetic oligonucleotide
  Target: APOC3; (+) strand; PAM type: YTN; PAM sequence: CTG
cccagatctgtgaagccatg

SEQ ID NO: 13852 - DNA, 20 bp, Artificial Sequence
  Description of Artificial Sequence: Synthetic oligonucleotide
  Target: APOC3; (+) strand; PAM type: YTN; PAM sequence: CTG
tgaagccatgtgcgtgcacg

SEQ ID NO: 13853 - DNA, 20 bp, Artificial Sequence
  Description of Artificial Sequence: Synthetic oligonucleotide
  Target: APOC3; (+) strand; PAM type: YTN; PAM sequence: TTC
agacatgagtgcaaggaggg

SEQ ID NO: 13854 - DNA, 20 bp, Artificial Sequence
  Description of Artificial Sequence: Synthetic oligonucleotide
  Target: APOC3; (+) strand; PAM type: YTN; PAM sequence: CTG
cacacccatgtgaacttgag

SEQ ID NO: 13855 - DNA, 20 bp, Artificial Sequence
  Description of Artificial Sequence: Synthetic oligonucleotide
  Target: APOC3; (+) strand; PAM type: YTN; PAM sequence: CTT
gagtgccaggccacacactc

SEQ ID NO: 13856 - DNA, 20 bp, Artificial Sequence
  Description of Artificial Sequence: Synthetic oligonucleotide
  Target: APOC3; (+) strand; PAM type: YTN; PAM sequence: TTG
agtgccaggccacacactct

SEQ ID NO: 13857 - DNA, 20 bp, Artificial Sequence
  Description of Artificial Sequence: Synthetic oligonucleotide
  Target: APOC3; (+) strand; PAM type: YTN; PAM sequence: CTC
tttttttttttttttttttt

SEQ ID NO: 13858 - DNA, 20 bp, Artificial Sequence
  Description of Artificial Sequence: Synthetic oligonucleotide
  Target: APOC3; (+) strand; PAM type: YTN; PAM sequence: CTT
tttttttttttttttttttt

SEQ ID NO: 13859 - DNA, 20 bp, Artificial Sequence
  Description of Artificial Sequence: Synthetic oligonucleotide
  Target: APOC3; (+) strand; PAM type: YTN; PAM sequence: TTT
ttttttttttttttttttta

SEQ ID NO: 13860 - DNA, 20 bp, Artificial Sequence
  Description of Artificial Sequence: Synthetic oligonucleotide
  Target: APOC3; (+) strand; PAM type: YTN; PAM sequence: TTT
ttttttttttttttttttag

SEQ ID NO: 13861 - DNA, 20 bp, Artificial Sequence
  Description of Artificial Sequence: Synthetic oligonucleotide
  Target: APOC3; (+) strand; PAM type: YTN; PAM sequence: TTT
tttttttttttttttttagc

SEQ ID NO: 13862 - DNA, 20 bp, Artificial Sequence
  Description of Artificial Sequence: Synthetic oligonucleotide
  Target: APOC3; (+) strand; PAM type: YTN; PAM sequence: TTT
ttttttttttttttttagct

SEQ ID NO: 13863 - DNA, 20 bp, Artificial Sequence
  Description of Artificial Sequence: Synthetic oligonucleotide
  Target: APOC3; (+) strand; PAM type: YTN; PAM sequence: TTT
tttttttttttttttagctg

SEQ ID NO: 13864 - DNA, 20 bp, Artificial Sequence
  Description of Artificial Sequence: Synthetic oligonucleotide
  Target: APOC3; (+) strand; PAM type: YTN; PAM sequence: TTT
ttttttttttttttagctgg

SEQ ID NO: 13865 - DNA, 20 bp, Artificial Sequence
  Description of Artificial Sequence: Synthetic oligonucleotide
  Target: APOC3; (+) strand; PAM type: YTN; PAM sequence: TTT
tttttttttttttagctgga

SEQ ID NO: 13866 - DNA, 20 bp, Artificial Sequence
  Description of Artificial Sequence: Synthetic oligonucleotide
  Target: APOC3; (+) strand; PAM type: YTN; PAM sequence: TTT
ttttttttttttagctggag

SEQ ID NO: 13867 - DNA, 20 bp, Artificial Sequence
  Description of Artificial Sequence: Synthetic oligonucleotide
  Target: APOC3; (+) strand; PAM type: YTN; PAM sequence: TTT
tttttttttttagctggagt

SEQ ID NO: 13868 - DNA, 20 bp, Artificial Sequence
  Description of Artificial Sequence: Synthetic oligonucleotide
  Target: APOC3; (+) strand; PAM type: YTN; PAM sequence: TTT
ttttttttttagctggagtc

SEQ ID NO: 13869 - DNA, 20 bp, Artificial Sequence
  Description of Artificial Sequence: Synthetic oligonucleotide
  Target: APOC3; (+) strand; PAM type: YTN; PAM sequence: TTT
tttttttttagctggagtct

SEQ ID NO: 13870 - DNA, 20 bp, Artificial Sequence
  Description of Artificial Sequence: Synthetic oligonucleotide
  Target: APOC3; (+) strand; PAM type: YTN; PAM sequence: TTT
ttttttttagctggagtctt

SEQ ID NO: 13871 - DNA, 20 bp, Artificial Sequence
  Description of Artificial Sequence: Synthetic oligonucleotide
  Target: APOC3; (+) strand; PAM type: YTN; PAM sequence: TTT
tttttttagctggagtcttg

SEQ ID NO: 13872 - DNA, 20 bp, Artificial Sequence
  Description of Artificial Sequence: Synthetic oligonucleotide
  Target: APOC3; (+) strand; PAM type: YTN; PAM sequence: TTT
ttttttagctggagtcttgc

SEQ ID NO: 13873 - DNA, 20 bp, Artificial Sequence
  Description of Artificial Sequence: Synthetic oligonucleotide
  Target: APOC3; (+) strand; PAM type: YTN; PAM sequence: TTT
tttttagctggagtcttgct

SEQ ID NO: 13874 - DNA, 20 bp, Artificial Sequence
  Description of Artificial Sequence: Synthetic oligonucleotide
  Target: APOC3; (+) strand; PAM type: YTN; PAM sequence: TTT
ttttagctggagtcttgctc

SEQ ID NO: 13875 - DNA, 20 bp, Artificial Sequence
  Description of Artificial Sequence: Synthetic oligonucleotide
  Target: APOC3; (+) strand; PAM type: YTN; PAM sequence: TTT
tttagctggagtcttgctcc

SEQ ID NO: 13876 - DNA, 20 bp, Artificial Sequence
  Description of Artificial Sequence: Synthetic oligonucleotide
  Target: APOC3; (+) strand; PAM type: YTN; PAM sequence: TTT
ttagctggagtcttgctccg

SEQ ID NO: 13877 - DNA, 20 bp, Artificial Sequence
  Description of Artificial Sequence: Synthetic oligonucleotide
  Target: APOC3; (+) strand; PAM type: YTN; PAM sequence: TTT
tagctggagtcttgctccgt

SEQ ID NO: 13878 - DNA, 20 bp, Artificial Sequence
  Description of Artificial Sequence: Synthetic oligonucleotide
  Target: APOC3; (+) strand; PAM type: YTN; PAM sequence: TTT
agctggagtcttgctccgtc

SEQ ID NO: 13879 - DNA, 20 bp, Artificial Sequence
  Description of Artificial Sequence: Synthetic oligonucleotide
  Target: APOC3; (+) strand; PAM type: YTN; PAM sequence: TTA
gctggagtcttgctccgtcg

SEQ ID NO: 13880 - DNA, 20 bp, Artificial Sequence
  Description of Artificial Sequence: Synthetic oligonucleotide
  Target: APOC3; (+) strand; PAM type: YTN; PAM sequence: CTG
gagtcttgctccgtcgccca

SEQ ID NO: 13881 - DNA, 20 bp, Artificial Sequence
  Description of Artificial Sequence: Synthetic oligonucleotide
  Target: APOC3; (+) strand; PAM type: YTN; PAM sequence: CTT
gctccgtcgcccaggctgga

SEQ ID NO: 13882 - DNA, 20 bp, Artificial Sequence
  Description of Artificial Sequence: Synthetic oligonucleotide
  Target: APOC3; (+) strand; PAM type: YTN; PAM sequence: TTG
ctccgtcgcccaggctggag

SEQ ID NO: 13883 - DNA, 20 bp, Artificial Sequence
  Description of Artificial Sequence: Synthetic oligonucleotide
  Target: APOC3; (+) strand; PAM type: YTN; PAM sequence: CTC
cgtcgcccaggctggagtgc

SEQ ID NO: 13884 - DNA, 20 bp, Artificial Sequence
  Description of Artificial Sequence: Synthetic oligonucleotide
  Target: APOC3; (+) strand; PAM type: YTN; PAM sequence: CTG
gagtgcagtggcatgatttc

SEQ ID NO: 13885 - DNA, 20 bp, Artificial Sequence
  Description of Artificial Sequence: Synthetic oligonucleotide
  Target: APOC3; (+) strand; PAM type: YTN; PAM sequence: TTT
cggctcactgtgacctctgc

SEQ ID NO: 13886 - DNA, 20 bp, Artificial Sequence
  Description of Artificial Sequence: Synthetic oligonucleotide
  Target: APOC3; (+) strand; PAM type: YTN; PAM sequence: TTC
ggctcactgtgacctctgcc

SEQ ID NO: 13887 - DNA, 20 bp, Artificial Sequence
  Description of Artificial Sequence: Synthetic oligonucleotide
  Target: APOC3; (+) strand; PAM type: YTN; PAM sequence: CTC
actgtgacctctgcctccca

SEQ ID NO: 13888 - DNA, 20 bp, Artificial Sequence
  Description of Artificial Sequence: Synthetic oligonucleotide
  Target: APOC3; (+) strand; PAM type: YTN; PAM sequence: CTG
tgacctctgcctcccaggtt

SEQ ID NO: 13889 - DNA, 20 bp, Artificial Sequence
  Description of Artificial Sequence: Synthetic oligonucleotide
  Target: APOC3; (+) strand; PAM type: YTN; PAM sequence: CTC
tgcctcccaggttcaagcga

SEQ ID NO: 13890 - DNA, 20 bp, Artificial Sequence
  Description of Artificial Sequence: Synthetic oligonucleotide
  Target: APOC3; (+) strand; PAM type: YTN; PAM sequence: CTG
cctcccaggttcaagcgatt

SEQ ID NO: 13891 - DNA, 20 bp, Artificial Sequence
  Description of Artificial Sequence: Synthetic oligonucleotide
  Target: APOC3; (+) strand; PAM type: YTN; PAM sequence: CTC
ccaggttcaagcgattctcc

SEQ ID NO: 13892 - DNA, 20 bp, Artificial Sequence
  Description of Artificial Sequence: Synthetic oligonucleotide
  Target: APOC3; (+) strand; PAM type: YTN; PAM sequence: TTC
aagcgattctcctgcctcag

SEQ ID NO: 13893 - DNA, 20 bp, Artificial Sequence
  Description of Artificial Sequence: Synthetic oligonucleotide
  Target: APOC3; (+) strand; PAM type: YTN; PAM sequence: TTC
tcctgcctcagccttcctag

SEQ ID NO: 13894 - DNA, 20 bp, Artificial Sequence
  Description of Artificial Sequence: Synthetic oligonucleotide
  Target: APOC3; (+) strand; PAM type: YTN; PAM sequence: CTC
ctgcctcagccttcctagta

SEQ ID NO: 13895 - DNA, 20 bp, Artificial Sequence
  Description of Artificial Sequence: Synthetic oligonucleotide
  Target: APOC3; (+) strand; PAM type: YTN; PAM sequence: CTG
cctcagccttcctagtagct

SEQ ID NO: 13896 - DNA, 20 bp, Artificial Sequence
  Description of Artificial Sequence: Synthetic oligonucleotide
  Target: APOC3; (+) strand; PAM type: YTN; PAM sequence: CTC
agccttcctagtagctggga

SEQ ID NO: 13897 - DNA, 20 bp, Artificial Sequence
  Description of Artificial Sequence: Synthetic oligonucleotide
  Target: APOC3; (+) strand; PAM type: YTN; PAM sequence: CTT
cctagtagctgggattacgg

SEQ ID NO: 13898 - DNA, 20 bp, Artificial Sequence
  Description of Artificial Sequence: Synthetic oligonucleotide
  Target: APOC3; (+) strand; PAM type: YTN; PAM sequence: TTC
ctagtagctgggattacggg

SEQ ID NO: 13899 - DNA, 20 bp, Artificial Sequence
  Description of Artificial Sequence: Synthetic oligonucleotide
  Target: APOC3; (+) strand; PAM type: YTN; PAM sequence: CTA
gtagctgggattacgggtgc

SEQ ID NO: 13900 - DNA, 20 bp, Artificial Sequence
  Description of Artificial Sequence: Synthetic oligonucleotide
  Target: APOC3; (+) strand; PAM type: YTN; PAM sequence: CTG
ggattacgggtgcaagccac

SEQ ID NO: 13901 - DNA, 20 bp, Artificial Sequence
  Description of Artificial Sequence: Synthetic oligonucleotide
  Target: APOC3; (+) strand; PAM type: YTN; PAM sequence: TTA
cgggtgcaagccaccatgcc

SEQ ID NO: 13902 - DNA, 20 bp, Artificial Sequence
  Description of Artificial Sequence: Synthetic oligonucleotide
  Target: APOC3; (+) strand; PAM type: YTN; PAM sequence: CTG
attttttttgtatttttagt

SEQ ID NO: 13903 - DNA, 20 bp, Artificial Sequence
  Description of Artificial Sequence: Synthetic oligonucleotide
  Target: APOC3; (+) strand; PAM type: YTN; PAM sequence: TTT
tttttgtatttttagtagag

SEQ ID NO: 13904 - DNA, 20 bp, Artificial Sequence
  Description of Artificial Sequence: Synthetic oligonucleotide
  Target: APOC3; (+) strand; PAM type: YTN; PAM sequence: TTT
ttttgtatttttagtagaga

SEQ ID NO: 13905 - DNA, 20 bp, Artificial Sequence
  Description of Artificial Sequence: Synthetic oligonucleotide
  Target: APOC3; (+) strand; PAM type: YTN; PAM sequence: TTT
tttgtatttttagtagagac

SEQ ID NO: 13906 - DNA, 20 bp, Artificial Sequence
  Description of Artificial Sequence: Synthetic oligonucleotide
  Target: APOC3; (+) strand; PAM type: YTN; PAM sequence: TTT
ttgtatttttagtagagaca

SEQ ID NO: 13907 - DNA, 20 bp, Artificial Sequence
  Description of Artificial Sequence: Synthetic oligonucleotide
  Target: APOC3; (+) strand; PAM type: YTN; PAM sequence: TTT
tgtatttttagtagagacag

SEQ ID NO: 13908 - DNA, 20 bp, Artificial Sequence
  Description of Artificial Sequence: Synthetic oligonucleotide
  Target: APOC3; (+) strand; PAM type: YTN; PAM sequence: TTT
gtatttttagtagagacagg

SEQ ID NO: 13909 - DNA, 20 bp, Artificial Sequence
  Description of Artificial Sequence: Synthetic oligonucleotide
  Target: APOC3; (+) strand; PAM type: YTN; PAM sequence: TTG
tatttttagtagagacaggg

SEQ ID NO: 13910 - DNA, 20 bp, Artificial Sequence
  Description of Artificial Sequence: Synthetic oligonucleotide
  Target: APOC3; (+) strand; PAM type: YTN; PAM sequence: TTT
ttagtagagacagggtttca

SEQ ID NO: 13911 - DNA, 20 bp, Artificial Sequence
  Description of Artificial Sequence: Synthetic oligonucleotide
  Target: APOC3; (+) strand; PAM type: YTN; PAM sequence: TTT
tagtagagacagggtttcac

SEQ ID NO: 13912 - DNA, 20 bp, Artificial Sequence
  Description of Artificial Sequence: Synthetic oligonucleotide
  Target: APOC3; (+) strand; PAM type: YTN; PAM sequence: TTT
agtagagacagggtttcacc

SEQ ID NO: 13913 - DNA, 20 bp, Artificial Sequence
  Description of Artificial Sequence: Synthetic oligonucleotide
  Target: APOC3; (+) strand; PAM type: YTN; PAM sequence: TTA
gtagagacagggtttcacca

SEQ ID NO: 13914 - DNA, 20 bp, Artificial Sequence
  Description of Artificial Sequence: Synthetic oligonucleotide
  Target: APOC3; (+) strand; PAM type: YTN; PAM sequence: TTT
caccatattggccaggctgg

SEQ ID NO: 13915 - DNA, 20 bp, Artificial Sequence
  Description of Artificial Sequence: Synthetic oligonucleotide
  Target: APOC3; (+) strand; PAM type: YTN; PAM sequence: TTC
accatattggccaggctggt

SEQ ID NO: 13916 - DNA, 20 bp, Artificial Sequence
  Description of Artificial Sequence: Synthetic oligonucleotide
  Target: APOC3; (+) strand; PAM type: YTN; PAM sequence: TTG
gccaggctggtctcaaactc

SEQ ID NO: 13917 - DNA, 20 bp, Artificial Sequence
  Description of Artificial Sequence: Synthetic oligonucleotide
  Target: APOC3; (+) strand; PAM type: YTN; PAM sequence: CTG
gtctcaaactcctggcctga

SEQ ID NO: 13918 - DNA, 20 bp, Artificial Sequence
  Description of Artificial Sequence: Synthetic oligonucleotide
  Target: APOC3; (+) strand; PAM type: YTN; PAM sequence: CTC
aaactcctggcctgaagtga

SEQ ID NO: 13919 - DNA, 20 bp, Artificial Sequence
  Description of Artificial Sequence: Synthetic oligonucleotide
  Target: APOC3; (+) strand; PAM type: YTN; PAM sequence: CTC
ctggcctgaagtgatacgcc

SEQ ID NO: 13920 - DNA, 20 bp, Artificial Sequence
  Description of Artificial Sequence: Synthetic oligonucleotide
  Target: APOC3; (+) strand; PAM type: YTN; PAM sequence: CTG
gcctgaagtgatacgcccac

SEQ ID NO: 13921 - DNA, 20 bp, Artificial Sequence
  Description of Artificial Sequence: Synthetic oligonucleotide
  Target: APOC3; (+) strand; PAM type: YTN; PAM sequence: CTG
aagtgatacgcccacctcag

SEQ ID NO: 13922 - DNA, 20 bp, Artificial Sequence
  Description of Artificial Sequence: Synthetic oligonucleotide
  Target: APOC3; (+) strand; PAM type: YTN; PAM sequence: CTC
agcctcccaaagtgctggga

SEQ ID NO: 13923 - DNA, 20 bp, Artificial Sequence
  Description of Artificial Sequence: Synthetic oligonucleotide
  Target: APOC3; (+) strand; PAM type: YTN; PAM sequence: CTC
ccaaagtgctgggattacag

SEQ ID NO: 13924 - DNA, 20 bp, Artificial Sequence
  Description of Artificial Sequence: Synthetic oligonucleotide
  Target: APOC3; (+) strand; PAM type: YTN; PAM sequence: CTG
ggattacaggcttgagccac

SEQ ID NO: 13925 - DNA, 20 bp, Artificial Sequence
  Description of Artificial Sequence: Synthetic oligonucleotide
  Target: APOC3; (+) strand; PAM type: YTN; PAM sequence: TTA
caggcttgagccaccgcacc

SEQ ID NO: 13926 - DNA, 20 bp, Artificial Sequence
  Description of Artificial Sequence: Synthetic oligonucleotide
  Target: APOC3; (+) strand; PAM type: YTN; PAM sequence: CTT
gagccaccgcacccgacccg

SEQ ID NO: 13927 - DNA, 20 bp, Artificial Sequence
  Description of Artificial Sequence: Synthetic oligonucleotide
  Target: APOC3; (+) strand; PAM type: YTN; PAM sequence: TTG
agccaccgcacccgacccgc

SEQ ID NO: 13928 - DNA, 20 bp, Artificial Sequence
  Description of Artificial Sequence: Synthetic oligonucleotide
  Target: APOC3; (+) strand; PAM type: YTN; PAM sequence: CTC
ttttcaataatcatggatgg

SEQ ID NO: 13929 - DNA, 20 bp, Artificial Sequence
  Description of Artificial Sequence: Synthetic oligonucleotide
  Target: APOC3; (+) strand; PAM type: YTN; PAM sequence: CTT
ttcaataatcatggatggcc

SEQ ID NO: 13930 - DNA, 20 bp, Artificial Sequence
  Description of Artificial Sequence: Synthetic oligonucleotide
  Target: APOC3; (+) strand; PAM type: YTN; PAM sequence: TTT
tcaataatcatggatggcca

SEQ ID NO: 13931 - DNA, 20 bp, Artificial Sequence
  Description of Artificial Sequence: Synthetic oligonucleotide
  Target: APOC3; (+) strand; PAM type: YTN; PAM sequence: TTT
caataatcatggatggccag

SEQ ID NO: 13932 - DNA, 20 bp, Artificial Sequence
  Description of Artificial Sequence: Synthetic oligonucleotide
  Target: APOC3; (+) strand; PAM type: YTN; PAM sequence: TTC
aataatcatggatggccagg

SEQ ID NO: 13933 - DNA, 20 bp, Artificial Sequence
  Description of Artificial Sequence: Synthetic oligonucleotide
  Target: APOC3; (+) strand; PAM type: YTN; PAM sequence: CTA
aaaagcgcggcctagcccat

SEQ ID NO: 13934 - DNA, 20 bp, Artificial Sequence
  Description of Artificial Sequence: Synthetic oligonucleotide
  Target: APOC3; (+) strand; PAM type: YTN; PAM sequence: CTA
gcccatcctgctgttcactg

SEQ ID NO: 13935 - DNA, 20 bp, Artificial Sequence
  Description of Artificial Sequence: Synthetic oligonucleotide
  Target: APOC3; (+) strand; PAM type: YTN; PAM sequence: CTG
ctgttcactgggcaagcgac

SEQ ID NO: 13936 - DNA, 20 bp, Artificial Sequence
  Description of Artificial Sequence: Synthetic oligonucleotide
  Target: APOC3; (+) strand; PAM type: YTN; PAM sequence: CTG
ttcactgggcaagcgacgtc

SEQ ID NO: 13937 - DNA, 20 bp, Artificial Sequence
  Description of Artificial Sequence: Synthetic oligonucleotide
  Target: APOC3; (+) strand; PAM type: YTN; PAM sequence: TTC
actgggcaagcgacgtcaca

SEQ ID NO: 13938 - DNA, 20 bp, Artificial Sequence
  Description of Artificial Sequence: Synthetic oligonucleotide
  Target: APOC3; (+) strand; PAM type: YTN; PAM sequence: CTG
ggcaagcgacgtcacaggtc

SEQ ID NO: 13939 - DNA, 20 bp, Artificial Sequence
  Description of Artificial Sequence: Synthetic oligonucleotide
  Target: APOC3; (+) strand; PAM type: YTN; PAM sequence: CTT
cagtgtcctcatccatgctc

SEQ ID NO: 13940 - DNA, 20 bp, Artificial Sequence
  Description of Artificial Sequence: Synthetic oligonucleotide
  Target: APOC3; (+) strand; PAM type: YTN; PAM sequence: TTC
agtgtcctcatccatgctct

SEQ ID NO: 13941 - DNA, 20 bp, Artificial Sequence
  Description of Artificial Sequence: Synthetic oligonucleotide
  Target: APOC3; (+) strand; PAM type: YTN; PAM sequence: CTC
atccatgctctgcgtctgat

SEQ ID NO: 13942 - DNA, 20 bp, Artificial Sequence
  Description of Artificial Sequence: Synthetic oligonucleotide
  Target: APOC3; (+) strand; PAM type: YTN; PAM sequence: CTC
tgcgtctgatggcaatctag

SEQ ID NO: 13943 - DNA, 20 bp, Artificial Sequence
  Description of Artificial Sequence: Synthetic oligonucleotide
  Target: APOC3; (+) strand; PAM type: YTN; PAM sequence: CTG
cgtctgatggcaatctagcc

SEQ ID NO: 13944 - DNA, 20 bp, Artificial Sequence
  Description of Artificial Sequence: Synthetic oligonucleotide
  Target: APOC3; (+) strand; PAM type: YTN; PAM sequence: CTG
atggcaatctagccaggatg

SEQ ID NO: 13945 - DNA, 20 bp, Artificial Sequence
  Description of Artificial Sequence: Synthetic oligonucleotide
  Target: APOC3; (+) strand; PAM type: YTN; PAM sequence: CTA
gccaggatgtggggaaggga

SEQ ID NO: 13946 - DNA, 20 bp, Artificial Sequence
  Description of Artificial Sequence: Synthetic oligonucleotide
  Target: APOC3; (+) strand; PAM type: YTN; PAM sequence: CTT
ggaaataaaaatgtacctgc

SEQ ID NO: 13947 - DNA, 20 bp, Artificial Sequence
  Description of Artificial Sequence: Synthetic oligonucleotide
  Target: APOC3; (+) strand; PAM type: YTN; PAM sequence: TTG
gaaataaaaatgtacctgca

SEQ ID NO: 13948 - DNA, 20 bp, Artificial Sequence
  Description of Artificial Sequence: Synthetic oligonucleotide
  Target: APOC3; (+) strand; PAM type: YTN; PAM sequence: CTG
caagaggtggtggtgaattt

SEQ ID NO: 13949 - DNA, 20 bp, Artificial Sequence
  Description of Artificial Sequence: Synthetic oligonucleotide
  Target: APOC3; (+) strand; PAM type: YTN; PAM sequence: TTT
tcttactcaggccagcttct

SEQ ID NO: 13950 - DNA, 20 bp, Artificial Sequence
  Description of Artificial Sequence: Synthetic oligonucleotide
  Target: APOC3; (+) strand; PAM type: YTN; PAM sequence: TTT
cttactcaggccagcttctg

SEQ ID NO: 13951 - DNA, 20 bp, Artificial Sequence
  Description of Artificial Sequence: Synthetic oligonucleotide
  Target: APOC3; (+) strand; PAM type: YTN; PAM sequence: TTC
ttactcaggccagcttctgc

SEQ ID NO: 13952 - DNA, 20 bp, Artificial Sequence
  Description of Artificial Sequence: Synthetic oligonucleotide
  Target: APOC3; (+) strand; PAM type: YTN; PAM sequence: CTT
actcaggccagcttctgcca

SEQ ID NO: 13953 - DNA, 20 bp, Artificial Sequence
  Description of Artificial Sequence: Synthetic oligonucleotide
  Target: APOC3; (+) strand; PAM type: YTN; PAM sequence: TTA
ctcaggccagcttctgccag

SEQ ID NO: 13954 - DNA, 20 bp, Artificial Sequence
  Description of Artificial Sequence: Synthetic oligonucleotide
  Target: APOC3; (+) strand; PAM type: YTN; PAM sequence: CTC
aggccagcttctgccagggc

SEQ ID NO: 13955 - DNA, 20 bp, Artificial Sequence
  Description of Artificial Sequence: Synthetic oligonucleotide
  Target: APOC3; (+) strand; PAM type: YTN; PAM sequence: CTT
ctgccagggctggcagaaag

SEQ ID NO: 13956 - DNA, 20 bp, Artificial Sequence
  Description of Artificial Sequence: Synthetic oligonucleotide
  Target: APOC3; (+) strand; PAM type: YTN; PAM sequence: TTC
tgccagggctggcagaaaga

SEQ ID NO: 13957 - DNA, 20 bp, Artificial Sequence
  Description of Artificial Sequence: Synthetic oligonucleotide
  Target: APOC3; (+) strand; PAM type: YTN; PAM sequence: CTG
ccagggctggcagaaagagg

SEQ ID NO: 13958 - DNA, 20 bp, Artificial Sequence
  Description of Artificial Sequence: Synthetic oligonucleotide
  Target: APOC3; (+) strand; PAM type: YTN; PAM sequence: CTG
gcagaaagagggggtggcat

SEQ ID NO: 13959 - DNA, 20 bp, Artificial Sequence
  Description of Artificial Sequence: Synthetic oligonucleotide
  Target: APOC3; (+) strand; PAM type: YTN; PAM sequence: CTG
gcttccactgctgtgcctga

SEQ ID NO: 13960 - DNA, 20 bp, Artificial Sequence
  Description of Artificial Sequence: Synthetic oligonucleotide
  Target: APOC3; (+) strand; PAM type: YTN; PAM sequence: CTT
ccactgctgtgcctgaggaa

SEQ ID NO: 13961 - DNA, 20 bp, Artificial Sequence
  Description of Artificial Sequence: Synthetic oligonucleotide
  Target: APOC3; (+) strand; PAM type: YTN; PAM sequence: TTC
cactgctgtgcctgaggaag

SEQ ID NO: 13962 - DNA, 20 bp, Artificial Sequence
  Description of Artificial Sequence: Synthetic oligonucleotide
  Target: APOC3; (+) strand; PAM type: YTN; PAM sequence: CTG
ctgtgcctgaggaagccgcg

SEQ ID NO: 13963 - DNA, 20 bp, Artificial Sequence
  Description of Artificial Sequence: Synthetic oligonucleotide
  Target: APOC3; (+) strand; PAM type: YTN; PAM sequence: CTG
tgcctgaggaagccgcggct

SEQ ID NO: 13964 - DNA, 20 bp, Artificial Sequence
  Description of Artificial Sequence: Synthetic oligonucleotide
  Target: APOC3; (+) strand; PAM type: YTN; PAM sequence: CTG
aggaagccgcggctgtttct

SEQ ID NO: 13965 - DNA, 20 bp, Artificial Sequence
  Description of Artificial Sequence: Synthetic oligonucleotide
  Target: APOC3; (+) strand; PAM type: YTN; PAM sequence: CTG
tttctgggcgggatgggagt

SEQ ID NO: 13966 - DNA, 20 bp, Artificial Sequence
  Description of Artificial Sequence: Synthetic oligonucleotide
  Target: APOC3; (+) strand; PAM type: YTN; PAM sequence: TTT
ctgggcgggatgggagtagt

SEQ ID NO: 13967 - DNA, 20 bp, Artificial Sequence
  Description of Artificial Sequence: Synthetic oligonucleotide
  Target: APOC3; (+) strand; PAM type: YTN; PAM sequence: TTC
tgggcgggatgggagtagtg

SEQ ID NO: 13968 - DNA, 20 bp, Artificial Sequence
  Description of Artificial Sequence: Synthetic oligonucleotide
  Target: APOC3; (+) strand; PAM type: YTN; PAM sequence: CTG
ggcgggatgggagtagtggg

SEQ ID NO: 13969 - DNA, 20 bp, Artificial Sequence
  Description of Artificial Sequence: Synthetic oligonucleotide
  Target: APOC3; (+) strand; PAM type: YTN; PAM sequence: CTG
gccttgtgagaagaaaaggg

SEQ ID NO: 13970 - DNA, 20 bp, Artificial Sequence
  Description of Artificial Sequence: Synthetic oligonucleotide
  Target: APOC3; (+) strand; PAM type: YTN; PAM sequence: CTT
gtgagaagaaaagggaagtg

SEQ ID NO: 13971 - DNA, 20 bp, Artificial Sequence
  Description of Artificial Sequence: Synthetic oligonucleotide
  Target: APOC3; (+) strand; PAM type: YTN; PAM sequence: TTG
tgagaagaaaagggaagtgt

SEQ ID NO: 13972 - DNA, 20 bp, Artificial Sequence
  Description of Artificial Sequence: Synthetic oligonucleotide
  Target: APOC3; (+) strand; PAM type: YTN; PAM sequence: CTG
tttgagaggtttttgaatta

SEQ ID NO: 13973 - DNA, 20 bp, Artificial Sequence
  Description of Artificial Sequence: Synthetic oligonucleotide
  Target: APOC3; (+) strand; PAM type: YTN; PAM sequence: TTT
gagaggtttttgaattagta

SEQ ID NO: 13974 - DNA, 20 bp, Artificial Sequence
  Description of Artificial Sequence: Synthetic oligonucleotide
  Target: APOC3; (+) strand; PAM type: YTN; PAM sequence: TTG
agaggtttttgaattagtaa

SEQ ID NO: 13975 - DNA, 20 bp, Artificial Sequence
  Description of Artificial Sequence: Synthetic oligonucleotide
  Target: APOC3; (+) strand; PAM type: YTN; PAM sequence: TTT
ttgaattagtaaaggaggac

SEQ ID NO: 13976 - DNA, 20 bp, Artificial Sequence
  Description of Artificial Sequence: Synthetic oligonucleotide
  Target: APOC3; (+) strand; PAM type: YTN; PAM sequence: TTT
tgaattagtaaaggaggaca

SEQ ID NO: 13977 - DNA, 20 bp, Artificial Sequence
  Description of Artificial Sequence: Synthetic oligonucleotide
  Target: APOC3; (+) strand; PAM type: YTN; PAM sequence: TTT
gaattagtaaaggaggacag

SEQ ID NO: 13978 - DNA, 20 bp, Artificial Sequence
  Description of Artificial Sequence: Synthetic oligonucleotide
  Target: APOC3; (+) strand; PAM type: YTN; PAM sequence: TTG
aattagtaaaggaggacagg

SEQ ID NO: 13979 - DNA, 20 bp, Artificial Sequence
  Description of Artificial Sequence: Synthetic oligonucleotide
  Target: APOC3; (+) strand; PAM type: YTN; PAM sequence: TTA
gtaaaggaggacaggcgcaa

SEQ ID NO: 13980 - DNA, 20 bp, Artificial Sequence
  Description of Artificial Sequence: Synthetic oligonucleotide
  Target: APOC3; (+) strand; PAM type: YTN; PAM sequence: CTC
caagcgcttcacttgcaccc

SEQ ID NO: 13981 - DNA, 20 bp, Artificial Sequence
  Description of Artificial Sequence: Synthetic oligonucleotide
  Target: APOC3; (+) strand; PAM type: YTN; PAM sequence: CTT
cacttgcacccgggaccaaa

SEQ ID NO: 13982 - DNA, 20 bp, Artificial Sequence
  Description of Artificial Sequence: Synthetic oligonucleotide
  Target: APOC3; (+) strand; PAM type: YTN; PAM sequence: TTC
acttgcacccgggaccaaac

SEQ ID NO: 13983 - DNA, 20 bp, Artificial Sequence
  Description of Artificial Sequence: Synthetic oligonucleotide
  Target: APOC3; (+) strand; PAM type: YTN; PAM sequence: CTT
gcacccgggaccaaacccca

SEQ ID NO: 13984 - DNA, 20 bp, Artificial Sequence
  Description of Artificial Sequence: Synthetic oligonucleotide
  Target: APOC3; (+) strand; PAM type: YTN; PAM sequence: TTG
cacccgggaccaaaccccaa

SEQ ID NO: 13985 - DNA, 20 bp, Artificial Sequence
  Description of Artificial Sequence: Synthetic oligonucleotide
  Target: APOC3; (+) strand; PAM type: YTN; PAM sequence: CTG
gctccctgaggccgccccgc

SEQ ID NO: 13986 - DNA, 20 bp, Artificial Sequence
  Description of Artificial Sequence: Synthetic oligonucleotide
  Target: APOC3; (+) strand; PAM type: YTN; PAM sequence: CTC
cctgaggccgccccgctccg

SEQ ID NO: 13987 - DNA, 20 bp, Artificial Sequence
  Description of Artificial Sequence: Synthetic oligonucleotide
  Target: APOC3; (+) strand; PAM type: YTN; PAM sequence: CTG
aggccgccccgctccgtccc

SEQ ID NO: 13988 - DNA, 20 bp, Artificial Sequence
  Description of Artificial Sequence: Synthetic oligonucleotide
  Target: APOC3; (+) strand; PAM type: YTN; PAM sequence: CTC
cgtcccgccccgctgacagc

SEQ ID NO: 13989 - DNA, 20 bp, Artificial Sequence
  Description of Artificial Sequence: Synthetic oligonucleotide
  Target: APOC3; (+) strand; PAM type: YTN; PAM sequence: CTG
acagcggctgggctggagaa

SEQ ID NO: 13990 - DNA, 20 bp, Artificial Sequence
  Description of Artificial Sequence: Synthetic oligonucleotide
  Target: APOC3; (+) strand; PAM type: YTN; PAM sequence: CTG
ggctggagaaggctctatac

SEQ ID NO: 13991 - DNA, 20 bp, Artificial Sequence
  Description of Artificial Sequence: Synthetic oligonucleotide
  Target: APOC3; (+) strand; PAM type: YTN; PAM sequence: CTG
gagaaggctctatacggaca

SEQ ID NO: 13992 - DNA, 20 bp, Artificial Sequence
  Description of Artificial Sequence: Synthetic oligonucleotide
  Target: APOC3; (+) strand; PAM type: YTN; PAM sequence: CTC
tatacggacacacctctggg

SEQ ID NO: 13993 - DNA, 20 bp, Artificial Sequence
  Description of Artificial Sequence: Synthetic oligonucleotide
  Target: APOC3; (+) strand; PAM type: YTN; PAM sequence: CTA
tacggacacacctctgggga

SEQ ID NO: 13994 - DNA, 20 bp, Artificial Sequence
  Description of Artificial Sequence: Synthetic oligonucleotide
  Target: APOC3; (+) strand; PAM type: YTN; PAM sequence: CTC
tggggacggggaacccactg

SEQ ID NO: 13995 - DNA, 20 bp, Artificial Sequence
  Description of Artificial Sequence: Synthetic oligonucleotide
  Target: APOC3; (+) strand; PAM type: YTN; PAM sequence: CTG
gggacggggaacccactgct

SEQ ID NO: 13996 - DNA, 20 bp, Artificial Sequence
  Description of Artificial Sequence: Synthetic oligonucleotide
  Target: APOC3; (+) strand; PAM type: YTN; PAM sequence: CTG
ctcccagctaaagcaaccct

SEQ ID NO: 13997 - DNA, 20 bp, Artificial Sequence
  Description of Artificial Sequence: Synthetic oligonucleotide
  Target: APOC3; (+) strand; PAM type: YTN; PAM sequence: CTC
ccagctaaagcaaccctgtt

SEQ ID NO: 13998 - DNA, 20 bp, Artificial Sequence
  Description of Artificial Sequence: Synthetic oligonucleotide
  Target: APOC3; (+) strand; PAM type: YTN; PAM sequence: CTA
aagcaaccctgtttcctggc

SEQ ID NO: 13999 - DNA, 20 bp, Artificial Sequence
  Description of Artificial Sequence: Synthetic oligonucleotide
  Target: APOC3; (+) strand; PAM type: YTN; PAM sequence: CTG
tttcctggcccgcctcagac

SEQ ID NO: 14000 - DNA, 20 bp, Artificial Sequence
  Description of Artificial Sequence: Synthetic oligonucleotide
  Target: APOC3; (+) strand; PAM type: YTN; PAM sequence: TTT
cctggcccgcctcagacagg

SEQ ID NO: 14001 - DNA, 20 bp, Artificial Sequence
  Description of Artificial Sequence: Synthetic oligonucleotide
  Target: APOC3; (+) strand; PAM type: YTN; PAM sequence: TTC
ctggcccgcctcagacaggg

SEQ ID NO: 14002 - DNA, 20 bp, Artificial Sequence
  Description of Artificial Sequence: Synthetic oligonucleotide
  Target: APOC3; (+) strand; PAM type: YTN; PAM sequence: CTG
gcccgcctcagacagggctg

SEQ ID NO: 14003 - DNA, 20 bp, Artificial Sequence
  Description of Artificial Sequence: Synthetic oligonucleotide
  Target: APOC3; (+) strand; PAM type: YTN; PAM sequence: CTC
agacagggctgcaggccttg

SEQ ID NO: 14004 - DNA, 20 bp, Artificial Sequence
  Description of Artificial Sequence: Synthetic oligonucleotide
  Target: APOC3; (+) strand; PAM type: YTN; PAM sequence: CTG
caggccttgtttgagcccct

SEQ ID NO: 14005 - DNA, 20 bp, Artificial Sequence
  Description of Artificial Sequence: Synthetic oligonucleotide
  Target: APOC3; (+) strand; PAM type: YTN; PAM sequence: CTT
gtttgagcccctttcagggc

SEQ ID NO: 14006 - DNA, 20 bp, Artificial Sequence
  Description of Artificial Sequence: Synthetic oligonucleotide
  Target: APOC3; (+) strand; PAM type: YTN; PAM sequence: TTG
tttgagcccctttcagggca

SEQ ID NO: 14007 - DNA, 20 bp, Artificial Sequence
  Description of Artificial Sequence: Synthetic oligonucleotide
  Target: APOC3; (+) strand; PAM type: YTN; PAM sequence: TTT
gagcccctttcagggcacct

SEQ ID NO: 14008 - DNA, 20 bp, Artificial Sequence
  Description of Artificial Sequence: Synthetic oligonucleotide
  Target: APOC3; (+) strand; PAM type: YTN; PAM sequence: TTG
agcccctttcagggcacctg

SEQ ID NO: 14009 - DNA, 20 bp, Artificial Sequence
  Description of Artificial Sequence: Synthetic oligonucleotide
  Target: APOC3; (+) strand; PAM type: YTN; PAM sequence: CTT
tcagggcacctggccttgga

SEQ ID NO: 14010 - DNA, 20 bp, Artificial Sequence
  Description of Artificial Sequence: Synthetic oligonucleotide
  Target: APOC3; (+) strand; PAM type: YTN; PAM sequence: TTT
cagggcacctggccttggat

SEQ ID NO: 14011 - DNA, 20 bp, Artificial Sequence
  Description of Artificial Sequence: Synthetic oligonucleotide
  Target: APOC3; (+) strand; PAM type: YTN; PAM sequence: TTC
agggcacctggccttggatt

SEQ ID NO: 14012 - DNA, 20 bp, Artificial Sequence
  Description of Artificial Sequence: Synthetic oligonucleotide
  Target: APOC3; (+) strand; PAM type: YTN; PAM sequence: CTG
gccttggattgtctgtggct

SEQ ID NO: 14013 - DNA, 20 bp, Artificial Sequence
  Description of Artificial Sequence: Synthetic oligonucleotide
  Target: APOC3; (+) strand; PAM type: YTN; PAM sequence: CTT
ggattgtctgtggctttgcc

SEQ ID NO: 14014 - DNA, 20 bp, Artificial Sequence
  Description of Artificial Sequence: Synthetic oligonucleotide
  Target: APOC3; (+) strand; PAM type: YTN; PAM sequence: TTG
gattgtctgtggctttgcct

SEQ ID NO: 14015 - DNA, 20 bp, Artificial Sequence
  Description of Artificial Sequence: Synthetic oligonucleotide
  Target: APOC3; (+) strand; PAM type: YTN; PAM sequence: TTG
tctgtggctttgcctggtcc

SEQ ID NO: 14016 - DNA, 20 bp, Artificial Sequence
  Description of Artificial Sequence: Synthetic oligonucleotide
  Target: APOC3; (+) strand; PAM type: YTN; PAM sequence: CTG
tggctttgcctggtccgctg

SEQ ID NO: 14017 - DNA, 20 bp, Artificial Sequence
  Description of Artificial Sequence: Synthetic oligonucleotide
  Target: APOC3; (+) strand; PAM type: YTN; PAM sequence: CTT
tgcctggtccgctgtgactt

SEQ ID NO: 14018 - DNA, 20 bp, Artificial Sequence
  Description of Artificial Sequence: Synthetic oligonucleotide
  Target: APOC3; (+) strand; PAM type: YTN; PAM sequence: TTT
gcctggtccgctgtgacttc

SEQ ID NO: 14019 - DNA, 20 bp, Artificial Sequence
  Description of Artificial Sequence: Synthetic oligonucleotide
  Target: APOC3; (+) strand; PAM type: YTN; PAM sequence: TTG
cctggtccgctgtgacttcc

SEQ ID NO: 14020 - DNA, 20 bp, Artificial Sequence
  Description of Artificial Sequence: Synthetic oligonucleotide
  Target: APOC3; (+) strand; PAM type: YTN; PAM sequence: CTG
gtccgctgtgacttcctttc

SEQ ID NO: 14021 - DNA, 20 bp, Artificial Sequence
  Description of Artificial Sequence: Synthetic oligonucleotide
  Target: APOC3; (+) strand; PAM type: YTN; PAM sequence: CTG
tgacttcctttctacttgag

SEQ ID NO: 14022 - DNA, 20 bp, Artificial Sequence
  Description of Artificial Sequence: Synthetic oligonucleotide
  Target: APOC3; (+) strand; PAM type: YTN; PAM sequence: CTT
cctttctacttgagccttgc

SEQ ID NO: 14023 - DNA, 20 bp, Artificial Sequence
  Description of Artificial Sequence: Synthetic oligonucleotide
  Target: APOC3; (+) strand; PAM type: YTN; PAM sequence: TTC
ctttctacttgagccttgct

SEQ ID NO: 14024 - DNA, 20 bp, Artificial Sequence
  Description of Artificial Sequence: Synthetic oligonucleotide
  Target: APOC3; (+) strand; PAM type: YTN; PAM sequence: CTT
tctacttgagccttgctaag

SEQ ID NO: 14025 - DNA, 20 bp, Artificial Sequence
  Description of Artificial Sequence: Synthetic oligonucleotide
  Target: APOC3; (+) strand; PAM type: YTN; PAM sequence: TTT
ctacttgagccttgctaagg

SEQ ID NO: 14026 - DNA, 20 bp, Artificial Sequence
  Description of Artificial Sequence: Synthetic oligonucleotide
  Target: APOC3; (+) strand; PAM type: YTN; PAM sequence: TTC
tacttgagccttgctaaggc

SEQ ID NO: 14027 - DNA, 20 bp, Artificial Sequence
  Description of Artificial Sequence: Synthetic oligonucleotide
  Target: APOC3; (+) strand; PAM type: YTN; PAM sequence: CTA
cttgagccttgctaaggcag

SEQ ID NO: 14028 - DNA, 20 bp, Artificial Sequence
  Description of Artificial Sequence: Synthetic oligonucleotide
  Target: APOC3; (+) strand; PAM type: YTN; PAM sequence: CTT
gagccttgctaaggcagact

SEQ ID NO: 14029 - DNA, 20 bp, Artificial Sequence
  Description of Artificial Sequence: Synthetic oligonucleotide
  Target: APOC3; (+) strand; PAM type: YTN; PAM sequence: TTG
agccttgctaaggcagactc

SEQ ID NO: 14030 - DNA, 20 bp, Artificial Sequence
  Description of Artificial Sequence: Synthetic oligonucleotide
  Target: APOC3; (+) strand; PAM type: YTN; PAM sequence: CTT
gctaaggcagactctactcc

SEQ ID NO: 14031 - DNA, 20 bp, Artificial Sequence
  Description of Artificial Sequence: Synthetic oligonucleotide
  Target: APOC3; (+) strand; PAM type: YTN; PAM sequence: TTG
ctaaggcagactctactccc

SEQ ID NO: 14032 - DNA, 20 bp, Artificial Sequence
  Description of Artificial Sequence: Synthetic oligonucleotide
  Target: APOC3; (+) strand; PAM type: YTN; PAM sequence: CTA
aggcagactctactccctca

SEQ ID NO: 14033 - DNA, 20 bp, Artificial Sequence
  Description of Artificial Sequence: Synthetic oligonucleotide
  Target: APOC3; (+) strand; PAM type: YTN; PAM sequence: CTC
tactccctcactcgtaagca

SEQ ID NO: 14034 - DNA, 20 bp, Artificial Sequence
  Description of Artificial Sequence: Synthetic oligonucleotide
  Target: APOC3; (+) strand; PAM type: YTN; PAM sequence: CTA
ctccctcactcgtaagcagc

SEQ ID NO: 14035 - DNA, 20 bp, Artificial Sequence
  Description of Artificial Sequence: Synthetic oligonucleotide
  Target: APOC3; (+) strand; PAM type: YTN; PAM sequence: CTC
cctcactcgtaagcagccag

SEQ ID NO: 14036 - DNA, 20 bp, Artificial Sequence
  Description of Artificial Sequence: Synthetic oligonucleotide
  Target: APOC3; (+) strand; PAM type: YTN; PAM sequence: CTC
actcgtaagcagccaggcgt

SEQ ID NO: 14037 - DNA, 20 bp, Artificial Sequence
  Description of Artificial Sequence: Synthetic oligonucleotide
  Target: APOC3; (+) strand; PAM type: YTN; PAM sequence: CTC
gtaagcagccaggcgtccag

SEQ ID NO: 14038 - DNA, 20 bp, Artificial Sequence
  Description of Artificial Sequence: Synthetic oligonucleotide
  Target: APOC3; (+) strand; PAM type: YTN; PAM sequence: CTC
caacgtcgatcttggcccta

SEQ ID NO: 14039 - DNA, 20 bp, Artificial Sequence
  Description of Artificial Sequence: Synthetic oligonucleotide
  Target: APOC3; (+) strand; PAM type: YTN; PAM sequence: CTT
ggccctaagacgtccagtct

SEQ ID NO: 14040 - DNA, 20 bp, Artificial Sequence
  Description of Artificial Sequence: Synthetic oligonucleotide
  Target: APOC3; (+) strand; PAM type: YTN; PAM sequence: TTG
gccctaagacgtccagtctg

SEQ ID NO: 14041 - DNA, 20 bp, Artificial Sequence
  Description of Artificial Sequence: Synthetic oligonucleotide
  Target: APOC3; (+) strand; PAM type: YTN; PAM sequence: CTA
agacgtccagtctgggcacg

SEQ ID NO: 14042 - DNA, 20 bp, Artificial Sequence
  Description of Artificial Sequence: Synthetic oligonucleotide
  Target: APOC3; (+) strand; PAM type: YTN; PAM sequence: CTG
ggcacggagttgttgagatc

SEQ ID NO: 14043 - DNA, 20 bp, Artificial Sequence
  Description of Artificial Sequence: Synthetic oligonucleotide
  Target: APOC3; (+) strand; PAM type: YTN; PAM sequence: TTG
ttgagatccggcaggaagtc

SEQ ID NO: 14044 - DNA, 20 bp, Artificial Sequence
  Description of Artificial Sequence: Synthetic oligonucleotide
  Target: APOC3; (+) strand; PAM type: YTN; PAM sequence: TTG
agatccggcaggaagtccct

SEQ ID NO: 14045 - DNA, 20 bp, Artificial Sequence
  Description of Artificial Sequence: Synthetic oligonucleotide
  Target: APOC3; (+) strand; PAM type: YTN; PAM sequence: CTG
ctccagggccaaaggcccca

SEQ ID NO: 14046 - DNA, 20 bp, Artificial Sequence
  Description of Artificial Sequence: Synthetic oligonucleotide
  Target: APOC3; (+) strand; PAM type: YTN; PAM sequence: CTC
cagggccaaaggccccaccc

SEQ ID NO: 14047 - DNA, 20 bp, Artificial Sequence
  Description of Artificial Sequence: Synthetic oligonucleotide
  Target: APOC3; (+) strand; PAM type: YTN; PAM sequence: CTC
ccccggatgtccccgcaccc

SEQ ID NO: 14048 - DNA, 20 bp, Artificial Sequence
  Description of Artificial Sequence: Synthetic oligonucleotide
  Target: APOC3; (+) strand; PAM type: YTN; PAM sequence: CTC
tattctcccaaaagaaagaa

SEQ ID NO: 14049 - DNA, 20 bp, Artificial Sequence
  Description of Artificial Sequence: Synthetic oligonucleotide
  Target: APOC3; (+) strand; PAM type: YTN; PAM sequence: CTA
ttctcccaaaagaaagaagc

SEQ ID NO: 14050 - DNA, 20 bp, Artificial Sequence
  Description of Artificial Sequence: Synthetic oligonucleotide
  Target: APOC3; (+) strand; PAM type: YTN; PAM sequence: TTC
tcccaaaagaaagaagctgc

SEQ ID NO: 14051 - DNA, 20 bp, Artificial Sequence
  Description of Artificial Sequence: Synthetic oligonucleotide
  Target: APOC3; (+) strand; PAM type: YTN; PAM sequence: CTC
ccaaaagaaagaagctgctt

SEQ ID NO: 14052 - DNA, 20 bp, Artificial Sequence
  Description of Artificial Sequence: Synthetic oligonucleotide
  Target: APOC3; (+) strand; PAM type: YTN; PAM sequence: CTG
cttcccactttggaaacgtt

SEQ ID NO: 14053 - DNA, 20 bp, Artificial Sequence
  Description of Artificial Sequence: Synthetic oligonucleotide
  Target: APOC3; (+) strand; PAM type: YTN; PAM sequence: CTT
cccactttggaaacgtttat

SEQ ID NO: 14054 - DNA, 20 bp, Artificial Sequence
  Description of Artificial Sequence: Synthetic oligonucleotide
  Target: APOC3; (+) strand; PAM type: YTN; PAM sequence: TTC
ccactttggaaacgtttatt

SEQ ID NO: 14055 - DNA, 20 bp, Artificial Sequence
  Description of Artificial Sequence: Synthetic oligonucleotide
  Target: APOC3; (+) strand; PAM type: YTN; PAM sequence: CTT
tggaaacgtttattctgagc

SEQ ID NO: 14056 - DNA, 20 bp, Artificial Sequence
  Description of Artificial Sequence: Synthetic oligonucleotide
  Target: APOC3; (+) strand; PAM type: YTN; PAM sequence: TTT
ggaaacgtttattctgagca

SEQ ID NO: 14057 - DNA, 20 bp, Artificial Sequence
  Description of Artificial Sequence: Synthetic oligonucleotide
  Target: APOC3; (+) strand; PAM type: YTN; PAM sequence: TTG
gaaacgtttattctgagcac

SEQ ID NO: 14058 - DNA, 20 bp, Artificial Sequence
  Description of Artificial Sequence: Synthetic oligonucleotide
  Target: APOC3; (+) strand; PAM type: YTN; PAM sequence: TTT
attctgagcaccgggaaggg

SEQ ID NO: 14059 - DNA, 20 bp, Artificial Sequence
  Description of Artificial Sequence: Synthetic oligonucleotide
  Target: APOC3; (+) strand; PAM type: YTN; PAM sequence: TTA
ttctgagcaccgggaagggg

SEQ ID NO: 14060 - DNA, 20 bp, Artificial Sequence
  Description of Artificial Sequence: Synthetic oligonucleotide
  Target: APOC3; (+) strand; PAM type: YTN; PAM sequence: TTC
tgagcaccgggaaggggggc

SEQ ID NO: 14061 - DNA, 20 bp, Artificial Sequence
  Description of Artificial Sequence: Synthetic oligonucleotide
  Target: APOC3; (+) strand; PAM type: YTN; PAM sequence: CTG
agcaccgggaaggggggcgg

SEQ ID NO: 14062 - DNA, 20 bp, Artificial Sequence
  Description of Artificial Sequence: Synthetic oligonucleotide
  Target: APOC3; (+) strand; PAM type: YTN; PAM sequence: CTC
actgggtgttgagcttctta

SEQ ID NO: 14063 - DNA, 20 bp, Artificial Sequence
  Description of Artificial Sequence: Synthetic oligonucleotide
  Target: APOC3; (+) strand; PAM type: YTN; PAM sequence: CTG
ggtgttgagcttcttagtgt

SEQ ID NO: 14064 - DNA, 20 bp, Artificial Sequence
  Description of Artificial Sequence: Synthetic oligonucleotide
  Target: APOC3; (+) strand; PAM type: YTN; PAM sequence: TTG
agcttcttagtgtactcctc

SEQ ID NO: 14065 - DNA, 20 bp, Artificial Sequence
  Description of Artificial Sequence: Synthetic oligonucleotide
  Target: APOC3; (+) strand; PAM type: YTN; PAM sequence: CTT
cttagtgtactcctcgagag

SEQ ID NO: 14066 - DNA, 20 bp, Artificial Sequence
  Description of Artificial Sequence: Synthetic oligonucleotide
  Target: APOC3; (+) strand; PAM type: YTN; PAM sequence: TTC
ttagtgtactcctcgagagc

SEQ ID NO: 14067 - DNA, 20 bp, Artificial Sequence
  Description of Artificial Sequence: Synthetic oligonucleotide
  Target: APOC3; (+) strand; PAM type: YTN; PAM sequence: CTT
agtgtactcctcgagagcgc

SEQ ID NO: 14068 - DNA, 20 bp, Artificial Sequence
  Description of Artificial Sequence: Synthetic oligonucleotide
  Target: APOC3; (+) strand; PAM type: YTN; PAM sequence: TTA
gtgtactcctcgagagcgct

SEQ ID NO: 14069 - DNA, 20 bp, Artificial Sequence
  Description of Artificial Sequence: Synthetic oligonucleotide
  Target: APOC3; (+) strand; PAM type: YTN; PAM sequence: CTC
ctcgagagcgctcaggaagc

SEQ ID NO: 14070 - DNA, 20 bp, Artificial Sequence
  Description of Artificial Sequence: Synthetic oligonucleotide
  Target: APOC3; (+) strand; PAM type: YTN; PAM sequence: CTC
gagagcgctcaggaagctga

SEQ ID NO: 14071 - DNA, 20 bp, Artificial Sequence
  Description of Artificial Sequence: Synthetic oligonucleotide
  Target: APOC3; (+) strand; PAM type: YTN; PAM sequence: CTC
aggaagctgaccttgaagct

SEQ ID NO: 14072 - DNA, 20 bp, Artificial Sequence
  Description of Artificial Sequence: Synthetic oligonucleotide
  Target: APOC3; (+) strand; PAM type: YTN; PAM sequence: CTG
accttgaagctctccagcac

SEQ ID NO: 14073 - DNA, 20 bp, Artificial Sequence
  Description of Artificial Sequence: Synthetic oligonucleotide
  Target: APOC3; (+) strand; PAM type: YTN; PAM sequence: CTT
gaagctctccagcacgggca

SEQ ID NO: 14074 - DNA, 20 bp, Artificial Sequence
  Description of Artificial Sequence: Synthetic oligonucleotide
  Target: APOC3; (+) strand; PAM type: YTN; PAM sequence: TTG
aagctctccagcacgggcag

SEQ ID NO: 14075 - DNA, 20 bp, Artificial Sequence
  Description of Artificial Sequence: Synthetic oligonucleotide
  Target: APOC3; (+) strand; PAM type: YTN; PAM sequence: CTC
tccagcacgggcagcaggcc

SEQ ID NO: 14076 - DNA, 20 bp, Artificial Sequence
  Description of Artificial Sequence: Synthetic oligonucleotide
  Target: APOC3; (+) strand; PAM type: YTN; PAM sequence: CTC
cagcacgggcagcaggcctt

SEQ ID NO: 14077 - DNA, 20 bp, Artificial Sequence
  Description of Artificial Sequence: Synthetic oligonucleotide
  Target: APOC3; (+) strand; PAM type: YTN; PAM sequence: CTT
ggcggaggtcctcgagcgcg

SEQ ID NO: 14078 - DNA, 20 bp, Artificial Sequence
  Description of Artificial Sequence: Synthetic oligonucleotide
  Target: APOC3; (+) strand; PAM type: YTN; PAM sequence: TTG
gcggaggtcctcgagcgcgg

SEQ ID NO: 14079 - DNA, 20 bp, Artificial Sequence
  Description of Artificial Sequence: Synthetic oligonucleotide
  Target: APOC3; (+) strand; PAM type: YTN; PAM sequence: CTC
gagcgcgggcttggccttct

SEQ ID NO: 14080 - DNA, 20 bp, Artificial Sequence
  Description of Artificial Sequence: Synthetic oligonucleotide
  Target: APOC3; (+) strand; PAM type: YTN; PAM sequence: CTT
ggccttctcgctgagcgtgc

SEQ ID NO: 14081 - DNA, 20 bp, Artificial Sequence
  Description of Artificial Sequence: Synthetic oligonucleotide
  Target: APOC3; (+) strand; PAM type: YTN; PAM sequence: TTG
gccttctcgctgagcgtgct

SEQ ID NO: 14082 - DNA, 20 bp, Artificial Sequence
  Description of Artificial Sequence: Synthetic oligonucleotide
  Target: APOC3; (+) strand; PAM type: YTN; PAM sequence: CTT
ctcgctgagcgtgctcagat

SEQ ID NO: 14083 - DNA, 20 bp, Artificial Sequence
  Description of Artificial Sequence: Synthetic oligonucleotide
  Target: APOC3; (+) strand; PAM type: YTN; PAM sequence: TTC
tcgctgagcgtgctcagatg

SEQ ID NO: 14084 - DNA, 20 bp, Artificial Sequence
  Description of Artificial Sequence: Synthetic oligonucleotide
  Target: APOC3; (+) strand; PAM type: YTN; PAM sequence: CTC
gctgagcgtgctcagatgct

SEQ ID NO: 14085 - DNA, 20 bp, Artificial Sequence
  Description of Artificial Sequence: Synthetic oligonucleotide
  Target: APOC3; (+) strand; PAM type: YTN; PAM sequence: CTG
agcgtgctcagatgctcggt

SEQ ID NO: 14086 - DNA, 20 bp, Artificial Sequence
  Description of Artificial Sequence: Synthetic oligonucleotide
  Target: APOC3; (+) strand; PAM type: YTN; PAM sequence: CTC
agatgctcggtggccttggc

SEQ ID NO: 14087 - DNA, 20 bp, Artificial Sequence
  Description of Artificial Sequence: Synthetic oligonucleotide
  Target: APOC3; (+) strand; PAM type: YTN; PAM sequence: CTC
ggtggccttggcgtggtact

SEQ ID NO: 14088 - DNA, 20 bp, Artificial Sequence
  Description of Artificial Sequence: Synthetic oligonucleotide
  Target: APOC3; (+) strand; PAM type: YTN; PAM sequence: CTT
ggcgtggtactcggccagtc

SEQ ID NO: 14089 - DNA, 20 bp, Artificial Sequence
  Description of Artificial Sequence: Synthetic oligonucleotide
  Target: APOC3; (+) strand; PAM type: YTN; PAM sequence: TTG
gcgtggtactcggccagtct

SEQ ID NO: 14090 - DNA, 20 bp, Artificial Sequence
  Description of Artificial Sequence: Synthetic oligonucleotide
  Target: APOC3; (+) strand; PAM type: YTN; PAM sequence: CTC
ggccagtctggcgccgccgt

SEQ ID NO: 14091 - DNA, 20 bp, Artificial Sequence
  Description of Artificial Sequence: Synthetic oligonucleotide
  Target: APOC3; (+) strand; PAM type: YTN; PAM sequence: CTG
gcgccgccgttctccttgag

SEQ ID NO: 14092 - DNA, 20 bp, Artificial Sequence
  Description of Artificial Sequence: Synthetic oligonucleotide
  Target: APOC3; (+) strand; PAM type: YTN; PAM sequence: TTC
tccttgagagcctcaaggcg

SEQ ID NO: 14093 - DNA, 20 bp, Artificial Sequence
  Description of Artificial Sequence: Synthetic oligonucleotide
  Target: APOC3; (+) strand; PAM type: YTN; PAM sequence: CTC
cttgagagcctcaaggcgcg

SEQ ID NO: 14094 - DNA, 20 bp, Artificial Sequence
  Description of Artificial Sequence: Synthetic oligonucleotide
  Target: APOC3; (+) strand; PAM type: YTN; PAM sequence: CTT
gagagcctcaaggcgcgcgg

SEQ ID NO: 14095 - DNA, 20 bp, Artificial Sequence
  Description of Artificial Sequence: Synthetic oligonucleotide
  Target: APOC3; (+) strand; PAM type: YTN; PAM sequence: TTG
agagcctcaaggcgcgcggc

SEQ ID NO: 14096 - DNA, 20 bp, Artificial Sequence
  Description of Artificial Sequence: Synthetic oligonucleotide
  Target: APOC3; (+) strand; PAM type: YTN; PAM sequence: CTC
aaggcgcgcggccaagcgct

SEQ ID NO: 14097 - DNA, 20 bp, Artificial Sequence
  Description of Artificial Sequence: Synthetic oligonucleotide
  Target: APOC3; (+) strand; PAM type: YTN; PAM sequence: CTG
gcgcagctcgtcgctgtagg

SEQ ID NO: 14098 - DNA, 20 bp, Artificial Sequence
  Description of Artificial Sequence: Synthetic oligonucleotide
  Target: APOC3; (+) strand; PAM type: YTN; PAM sequence: CTC
gtcgctgtagggggccagat

SEQ ID NO: 14099 - DNA, 20 bp, Artificial Sequence
  Description of Artificial Sequence: Synthetic oligonucleotide
  Target: APOC3; (+) strand; PAM type: YTN; PAM sequence: CTG
tagggggccagatgcgtgcg

SEQ ID NO: 14100 - DNA, 20 bp, Artificial Sequence
  Description of Artificial Sequence: Synthetic oligonucleotide
  Target: APOC3; (+) strand; PAM type: YTN; PAM sequence: CTC
ctcgcccagtgggctcagct

SEQ ID NO: 14101 - DNA, 20 bp, Artificial Sequence
  Description of Artificial Sequence: Synthetic oligonucleotide
  Target: APOC3; (+) strand; PAM type: YTN; PAM sequence: CTC
gcccagtgggctcagcttct

SEQ ID NO: 14102 - DNA, 20 bp, Artificial Sequence
  Description of Artificial Sequence: Synthetic oligonucleotide
  Target: APOC3; (+) strand; PAM type: YTN; PAM sequence: CTC
agcttctcttgcagctcgtg

SEQ ID NO: 14103 - DNA, 20 bp, Artificial Sequence
  Description of Artificial Sequence: Synthetic oligonucleotide
  Target: APOC3; (+) strand; PAM type: YTN; PAM sequence: CTT
ctcttgcagctcgtgcagct

SEQ ID NO: 14104 - DNA, 20 bp, Artificial Sequence
  Description of Artificial Sequence: Synthetic oligonucleotide
  Target: APOC3; (+) strand; PAM type: YTN; PAM sequence: TTC
tcttgcagctcgtgcagctt

SEQ ID NO: 14105 - DNA, 20 bp, Artificial Sequence
  Description of Artificial Sequence: Synthetic oligonucleotide
  Target: APOC3; (+) strand; PAM type: YTN; PAM sequence: CTC
ttgcagctcgtgcagcttct

SEQ ID NO: 14106 - DNA, 20 bp, Artificial Sequence
  Description of Artificial Sequence: Synthetic oligonucleotide
  Target: APOC3; (+) strand; PAM type: YTN; PAM sequence: CTT
gcagctcgtgcagcttctgg

SEQ ID NO: 14107 - DNA, 20 bp, Artificial Sequence
  Description of Artificial Sequence: Synthetic oligonucleotide
  Target: APOC3; (+) strand; PAM type: YTN; PAM sequence: TTG
cagctcgtgcagcttctggc

SEQ ID NO: 14108 - DNA, 20 bp, Artificial Sequence
  Description of Artificial Sequence: Synthetic oligonucleotide
  Target: APOC3; (+) strand; PAM type: YTN; PAM sequence: CTC
gtgcagcttctggcgcgcgc

SEQ ID NO: 14109 - DNA, 20 bp, Artificial Sequence
  Description of Artificial Sequence: Synthetic oligonucleotide
  Target: APOC3; (+) strand; PAM type: YTN; PAM sequence: CTT
ctggcgcgcgccctcttgga

SEQ ID NO: 14110 - DNA, 20 bp, Artificial Sequence
  Description of Artificial Sequence: Synthetic oligonucleotide
  Target: APOC3; (+) strand; PAM type: YTN; PAM sequence: TTC
tggcgcgcgccctcttggag

SEQ ID NO: 14111 - DNA, 20 bp, Artificial Sequence
  Description of Artificial Sequence: Synthetic oligonucleotide
  Target: APOC3; (+) strand; PAM type: YTN; PAM sequence: CTG
gcgcgcgccctcttggagct

SEQ ID NO: 14112 - DNA, 20 bp, Artificial Sequence
  Description of Artificial Sequence: Synthetic oligonucleotide
  Target: APOC3; (+) strand; PAM type: YTN; PAM sequence: CTC
ttggagctctgcgcgcagcg

SEQ ID NO: 14113 - DNA, 20 bp, Artificial Sequence
  Description of Artificial Sequence: Synthetic oligonucleotide
  Target: APOC3; (+) strand; PAM type: YTN; PAM sequence: CTT
ggagctctgcgcgcagcggc

SEQ ID NO: 14114 - DNA, 20 bp, Artificial Sequence
  Description of Artificial Sequence: Synthetic oligonucleotide
  Target: APOC3; (+) strand; PAM type: YTN; PAM sequence: TTG
gagctctgcgcgcagcggct

SEQ ID NO: 14115 - DNA, 20 bp, Artificial Sequence
  Description of Artificial Sequence: Synthetic oligonucleotide
  Target: APOC3; (+) strand; PAM type: YTN; PAM sequence: CTC
tgcgcgcagcggctccacct

SEQ ID NO: 14116 - DNA, 20 bp, Artificial Sequence
  Description of Artificial Sequence: Synthetic oligonucleotide
  Target: APOC3; (+) strand; PAM type: YTN; PAM sequence: CTG
cgcgcagcggctccaccttc

SEQ ID NO: 14117 - DNA, 20 bp, Artificial Sequence
  Description of Artificial Sequence: Synthetic oligonucleotide
  Target: APOC3; (+) strand; PAM type: YTN; PAM sequence: CTC
caccttctggcggtagagct

SEQ ID NO: 14118 - DNA, 20 bp, Artificial Sequence
  Description of Artificial Sequence: Synthetic oligonucleotide
  Target: APOC3; (+) strand; PAM type: YTN; PAM sequence: CTT
ctggcggtagagctccatct

SEQ ID NO: 14119 - DNA, 20 bp, Artificial Sequence
  Description of Artificial Sequence: Synthetic oligonucleotide
  Target: APOC3; (+) strand; PAM type: YTN; PAM sequence: TTC
tggcggtagagctccatctc

SEQ ID NO: 14120 - DNA, 20 bp, Artificial Sequence
  Description of Artificial Sequence: Synthetic oligonucleotide
  Target: APOC3; (+) strand; PAM type: YTN; PAM sequence: CTG
gcggtagagctccatctcct

SEQ ID NO: 14121 - DNA, 20 bp, Artificial Sequence
  Description of Artificial Sequence: Synthetic oligonucleotide
  Target: APOC3; (+) strand; PAM type: YTN; PAM sequence: CTC
catctcctcctgccacttct

SEQ ID NO: 14122 - DNA, 20 bp, Artificial Sequence
  Description of Artificial Sequence: Synthetic oligonucleotide
  Target: APOC3; (+) strand; PAM type: YTN; PAM sequence: CTC
ctcctgccacttcttctgga

SEQ ID NO: 14123 - DNA, 20 bp, Artificial Sequence
  Description of Artificial Sequence: Synthetic oligonucleotide
  Target: APOC3; (+) strand; PAM type: YTN; PAM sequence: CTC
ctgccacttcttctggaagt

SEQ ID NO: 14124 - DNA, 20 bp, Artificial Sequence
  Description of Artificial Sequence: Synthetic oligonucleotide
  Target: APOC3; (+) strand; PAM type: YTN; PAM sequence: CTG
ccacttcttctggaagtcgt

SEQ ID NO: 14125 - DNA, 20 bp, Artificial Sequence
  Description of Artificial Sequence: Synthetic oligonucleotide
  Target: APOC3; (+) strand; PAM type: YTN; PAM sequence: CTT
cttctggaagtcgtccaggt

SEQ ID NO: 14126 - DNA, 20 bp, Artificial Sequence
  Description of Artificial Sequence: Synthetic oligonucleotide
  Target: APOC3; (+) strand; PAM type: YTN; PAM sequence: TTC
ttctggaagtcgtccaggta

SEQ ID NO: 14127 - DNA, 20 bp, Artificial Sequence
  Description of Artificial Sequence: Synthetic oligonucleotide
  Target: APOC3; (+) strand; PAM type: YTN; PAM sequence: CTT
ctggaagtcgtccaggtagg

SEQ ID NO: 14128 - DNA, 20 bp, Artificial Sequence
  Description of Artificial Sequence: Synthetic oligonucleotide
  Target: APOC3; (+) strand; PAM type: YTN; PAM sequence: TTC
tggaagtcgtccaggtaggg

SEQ ID NO: 14129 - DNA, 20 bp, Artificial Sequence
  Description of Artificial Sequence: Synthetic oligonucleotide
  Target: APOC3; (+) strand; PAM type: YTN; PAM sequence: CTG
gaagtcgtccaggtagggct

SEQ ID NO: 14130 - DNA, 20 bp, Artificial Sequence
  Description of Artificial Sequence: Synthetic oligonucleotide
  Target: APOC3; (+) strand; PAM type: YTN; PAM sequence: CTG
caccttggccttcacctcct

SEQ ID NO: 14131 - DNA, 20 bp, Artificial Sequence
  Description of Artificial Sequence: Synthetic oligonucleotide
  Target: APOC3; (+) strand; PAM type: YTN; PAM sequence: CTT
ggccttcacctcctccagat

SEQ ID NO: 14132 - DNA, 20 bp, Artificial Sequence
  Description of Artificial Sequence: Synthetic oligonucleotide
  Target: APOC3; (+) strand; PAM type: YTN; PAM sequence: TTG
gccttcacctcctccagatc

SEQ ID NO: 14133 - DNA, 20 bp, Artificial Sequence
  Description of Artificial Sequence: Synthetic oligonucleotide
  Target: APOC3; (+) strand; PAM type: YTN; PAM sequence: CTT
cacctcctccagatccttgc

SEQ ID NO: 14134 - DNA, 20 bp, Artificial Sequence
  Description of Artificial Sequence: Synthetic oligonucleotide
  Target: APOC3; (+) strand; PAM type: YTN; PAM sequence: TTC
acctcctccagatccttgct

SEQ ID NO: 14135 - DNA, 20 bp, Artificial Sequence
  Description of Artificial Sequence: Synthetic oligonucleotide
  Target: APOC3; (+) strand; PAM type: YTN; PAM sequence: CTC
ctccagatccttgctcatct

SEQ ID NO: 14136 - DNA, 20 bp, Artificial Sequence
  Description of Artificial Sequence: Synthetic oligonucleotide
  Target: APOC3; (+) strand; PAM type: YTN; PAM sequence: CTC
cagatccttgctcatctcct

SEQ ID NO: 14137 - DNA, 20 bp, Artificial Sequence
  Description of Artificial Sequence: Synthetic oligonucleotide
  Target: APOC3; (+) strand; PAM type: YTN; PAM sequence: CTT
gctcatctcctgcctcaggc

SEQ ID NO: 14138 - DNA, 20 bp, Artificial Sequence
  Description of Artificial Sequence: Synthetic oligonucleotide
  Target: APOC3; (+) strand; PAM type: YTN; PAM sequence: TTG
ctcatctcctgcctcaggcc

SEQ ID NO: 14139 - DNA, 20 bp, Artificial Sequence
  Description of Artificial Sequence: Synthetic oligonucleotide
  Target: APOC3; (+) strand; PAM type: YTN; PAM sequence: CTC
atctcctgcctcaggccctc

SEQ ID NO: 14140 - DNA, 20 bp, Artificial Sequence
  Description of Artificial Sequence: Synthetic oligonucleotide
  Target: APOC3; (+) strand; PAM type: YTN; PAM sequence: CTC
ctgcctcaggccctctgtct

SEQ ID NO: 14141 - DNA, 20 bp, Artificial Sequence
  Description of Artificial Sequence: Synthetic oligonucleotide
  Target: APOC3; (+) strand; PAM type: YTN; PAM sequence: CTG
cctcaggccctctgtctcct

SEQ ID NO: 14142 - DNA, 20 bp, Artificial Sequence
  Description of Artificial Sequence: Synthetic oligonucleotide
  Target: APOC3; (+) strand; PAM type: YTN; PAM sequence: CTC
aggccctctgtctccttttc

SEQ ID NO: 14143 - DNA, 20 bp, Artificial Sequence
  Description of Artificial Sequence: Synthetic oligonucleotide
  Target: APOC3; (+) strand; PAM type: YTN; PAM sequence: CTC
tgtctccttttccaggttat

SEQ ID NO: 14144 - DNA, 20 bp, Artificial Sequence
  Description of Artificial Sequence: Synthetic oligonucleotide
  Target: APOC3; (+) strand; PAM type: YTN; PAM sequence: CTG
tctccttttccaggttatcc

SEQ ID NO: 14145 - DNA, 20 bp, Artificial Sequence
  Description of Artificial Sequence: Synthetic oligonucleotide
  Target: APOC3; (+) strand; PAM type: YTN; PAM sequence: CTC
cttttccaggttatcccaga

SEQ ID NO: 14146 - DNA, 20 bp, Artificial Sequence
  Description of Artificial Sequence: Synthetic oligonucleotide
  Target: APOC3; (+) strand; PAM type: YTN; PAM sequence: CTT
ttccaggttatcccagaact

SEQ ID NO: 14147 - DNA, 20 bp, Artificial Sequence
  Description of Artificial Sequence: Synthetic oligonucleotide
  Target: APOC3; (+) strand; PAM type: YTN; PAM sequence: TTT
tccaggttatcccagaactc

SEQ ID NO: 14148 - DNA, 20 bp, Artificial Sequence
  Description of Artificial Sequence: Synthetic oligonucleotide
  Target: APOC3; (+) strand; PAM type: YTN; PAM sequence: TTT
ccaggttatcccagaactcc

SEQ ID NO: 14149 - DNA, 20 bp, Artificial Sequence
  Description of Artificial Sequence: Synthetic oligonucleotide
  Target: APOC3; (+) strand; PAM type: YTN; PAM sequence: TTC
caggttatcccagaactcct

SEQ ID NO: 14150 - DNA, 20 bp, Artificial Sequence
  Description of Artificial Sequence: Synthetic oligonucleotide
  Target: APOC3; (+) strand; PAM type: YTN; PAM sequence: TTA
tcccagaactcctgggtcac

SEQ ID NO: 14151 - DNA, 20 bp, Artificial Sequence
  Description of Artificial Sequence: Synthetic oligonucleotide
  Target: APOC3; (+) strand; PAM type: YTN; PAM sequence: CTC
ctgggtcacagggccgagct

SEQ ID NO: 14152 - DNA, 20 bp, Artificial Sequence
  Description of Artificial Sequence: Synthetic oligonucleotide
  Target: APOC3; (+) strand; PAM type: YTN; PAM sequence: CTG
ggtcacagggccgagctgtt

SEQ ID NO: 14153 - DNA, 20 bp, Artificial Sequence
  Description of Artificial Sequence: Synthetic oligonucleotide
  Target: APOC3; (+) strand; PAM type: YTN; PAM sequence: CTG
ttcgcgcagcttgctgaagg

SEQ ID NO: 14154 - DNA, 20 bp, Artificial Sequence
  Description of Artificial Sequence: Synthetic oligonucleotide
  Target: APOC3; (+) strand; PAM type: YTN; PAM sequence: TTC
gcgcagcttgctgaaggtgg

SEQ ID NO: 14155 - DNA, 20 bp, Artificial Sequence
  Description of Artificial Sequence: Synthetic oligonucleotide
  Target: APOC3; (+) strand; PAM type: YTN; PAM sequence: CTT
gctgaaggtggaggtcacgc

SEQ ID NO: 14156 - DNA, 20 bp, Artificial Sequence
  Description of Artificial Sequence: Synthetic oligonucleotide
  Target: APOC3; (+) strand; PAM type: YTN; PAM sequence: TTG
ctgaaggtggaggtcacgct

SEQ ID NO: 14157 - DNA, 20 bp, Artificial Sequence
  Description of Artificial Sequence: Synthetic oligonucleotide
  Target: APOC3; (+) strand; PAM type: YTN; PAM sequence: CTG
aaggtggaggtcacgctgtc

SEQ ID NO: 14158 - DNA, 20 bp, Artificial Sequence
  Description of Artificial Sequence: Synthetic oligonucleotide
  Target: APOC3; (+) strand; PAM type: YTN; PAM sequence: CTG
tcccagttgtcaaggagctt

SEQ ID NO: 14159 - DNA, 20 bp, Artificial Sequence
  Description of Artificial Sequence: Synthetic oligonucleotide
  Target: APOC3; (+) strand; PAM type: YTN; PAM sequence: TTG
tcaaggagctttaggctgga

SEQ ID NO: 14160 - DNA, 20 bp, Artificial Sequence
  Description of Artificial Sequence: Synthetic oligonucleotide
  Target: APOC3; (+) strand; PAM type: YTN; PAM sequence: CTT
taggctggagggtgagacag

SEQ ID NO: 14161 - DNA, 20 bp, Artificial Sequence
  Description of Artificial Sequence: Synthetic oligonucleotide
  Target: APOC3; (+) strand; PAM type: YTN; PAM sequence: TTT
aggctggagggtgagacaga

SEQ ID NO: 14162 - DNA, 20 bp, Artificial Sequence
  Description of Artificial Sequence: Synthetic oligonucleotide
  Target: APOC3; (+) strand; PAM type: YTN; PAM sequence: TTA
ggctggagggtgagacagaa

SEQ ID NO: 14163 - DNA, 20 bp, Artificial Sequence
  Description of Artificial Sequence: Synthetic oligonucleotide
  Target: APOC3; (+) strand; PAM type: YTN; PAM sequence: CTG
gagggtgagacagaagggtt

SEQ ID NO: 14164 - DNA, 20 bp, Artificial Sequence
  Description of Artificial Sequence: Synthetic oligonucleotide
  Target: APOC3; (+) strand; PAM type: YTN; PAM sequence: TTG
agggctggcctcccagcgcc

SEQ ID NO: 14165 - DNA, 20 bp, Artificial Sequence
  Description of Artificial Sequence: Synthetic oligonucleotide
  Target: APOC3; (+) strand; PAM type: YTN; PAM sequence: CTG
gcctcccagcgccccagcct

SEQ ID NO: 14166 - DNA, 20 bp, Artificial Sequence
  Description of Artificial Sequence: Synthetic oligonucleotide
  Target: APOC3; (+) strand; PAM type: YTN; PAM sequence: CTC
ccagcgccccagcctatcag

SEQ ID NO: 14167 - DNA, 20 bp, Artificial Sequence
  Description of Artificial Sequence: Synthetic oligonucleotide
  Target: APOC3; (+) strand; PAM type: YTN; PAM sequence: CTA
tcaggggtgagccctgggtg

SEQ ID NO: 14168 - DNA, 20 bp, Artificial Sequence
  Description of Artificial Sequence: Synthetic oligonucleotide
  Target: APOC3; (+) strand; PAM type: YTN; PAM sequence: CTG
ggtgacacctgtccgcggag

SEQ ID NO: 14169 - DNA, 20 bp, Artificial Sequence
  Description of Artificial Sequence: Synthetic oligonucleotide
  Target: APOC3; (+) strand; PAM type: YTN; PAM sequence: CTG
tccgcggaggtgcagtggcc

SEQ ID NO: 14170 - DNA, 20 bp, Artificial Sequence
  Description of Artificial Sequence: Synthetic oligonucleotide
  Target: APOC3; (+) strand; PAM type: YTN; PAM sequence: CTA
gcatttccagtacactctca

SEQ ID NO: 14171 - DNA, 20 bp, Artificial Sequence
  Description of Artificial Sequence: Synthetic oligonucleotide
  Target: APOC3; (+) strand; PAM type: YTN; PAM sequence: TTT
ccagtacactctcaaccaac

SEQ ID NO: 14172 - DNA, 20 bp, Artificial Sequence
  Description of Artificial Sequence: Synthetic oligonucleotide
  Target: APOC3; (+) strand; PAM type: YTN; PAM sequence: TTC
cagtacactctcaaccaaca

SEQ ID NO: 14173 - DNA, 20 bp, Artificial Sequence
  Description of Artificial Sequence: Synthetic oligonucleotide
  Target: APOC3; (+) strand; PAM type: YTN; PAM sequence: CTC
tcaaccaacacccctgcccc

SEQ ID NO: 14174 - DNA, 20 bp, Artificial Sequence
  Description of Artificial Sequence: Synthetic oligonucleotide
  Target: APOC3; (+) strand; PAM type: YTN; PAM sequence: CTC
aaccaacacccctgccccgc

SEQ ID NO: 14175 - DNA, 20 bp, Artificial Sequence
  Description of Artificial Sequence: Synthetic oligonucleotide
  Target: APOC3; (+) strand; PAM type: YTN; PAM sequence: CTG
ccccgccaggccatgccccg

SEQ ID NO: 14176 - DNA, 20 bp, Artificial Sequence
  Description of Artificial Sequence: Synthetic oligonucleotide
  Target: APOC3; (+) strand; PAM type: YTN; PAM sequence: TTG
tgcagctggaccgaggcaca

SEQ ID NO: 14177 - DNA, 20 bp, Artificial Sequence
  Description of Artificial Sequence: Synthetic oligonucleotide
  Target: APOC3; (+) strand; PAM type: YTN; PAM sequence: CTG
gaccgaggcacagagaggag

SEQ ID NO: 14178 - DNA, 20 bp, Artificial Sequence
  Description of Artificial Sequence: Synthetic oligonucleotide
  Target: APOC3; (+) strand; PAM type: YTN; PAM sequence: CTA
aaaaggagacagagctggga

SEQ ID NO: 14179 - DNA, 20 bp, Artificial Sequence
  Description of Artificial Sequence: Synthetic oligonucleotide
  Target: APOC3; (+) strand; PAM type: YTN; PAM sequence: CTG
ggactagtgcccagttacgt

SEQ ID NO: 14180 - DNA, 20 bp, Artificial Sequence
  Description of Artificial Sequence: Synthetic oligonucleotide
  Target: APOC3; (+) strand; PAM type: YTN; PAM sequence: CTA
gtgcccagttacgttggtct

SEQ ID NO: 14181 - DNA, 20 bp, Artificial Sequence
  Description of Artificial Sequence: Synthetic oligonucleotide
  Target: APOC3; (+) strand; PAM type: YTN; PAM sequence: TTA
cgttggtctccaaagtgggc

SEQ ID NO: 14182 - DNA, 20 bp, Artificial Sequence
  Description of Artificial Sequence: Synthetic oligonucleotide
  Target: APOC3; (+) strand; PAM type: YTN; PAM sequence: TTG
gtctccaaagtgggcccttg

SEQ ID NO: 14183 - DNA, 20 bp, Artificial Sequence
  Description of Artificial Sequence: Synthetic oligonucleotide
  Target: APOC3; (+) strand; PAM type: YTN; PAM sequence: CTC
caaagtgggcccttgaagga

SEQ ID NO: 14184 - DNA, 20 bp, Artificial Sequence
  Description of Artificial Sequence: Synthetic oligonucleotide
  Target: APOC3; (+) strand; PAM type: YTN; PAM sequence: CTT
gaaggacctcgcttctatgc

SEQ ID NO: 14185 - DNA, 20 bp, Artificial Sequence
  Description of Artificial Sequence: Synthetic oligonucleotide
  Target: APOC3; (+) strand; PAM type: YTN; PAM sequence: TTG
aaggacctcgcttctatgcc

SEQ ID NO: 14186 - DNA, 20 bp, Artificial Sequence
  Description of Artificial Sequence: Synthetic oligonucleotide
  Target: APOC3; (+) strand; PAM type: YTN; PAM sequence: CTC
gcttctatgcctccagcgca

SEQ ID NO: 14187 - DNA, 20 bp, Artificial Sequence
  Description of Artificial Sequence: Synthetic oligonucleotide
  Target: APOC3; (+) strand; PAM type: YTN; PAM sequence: CTT
ctatgcctccagcgcattct

SEQ ID NO: 14188 - DNA, 20 bp, Artificial Sequence
  Description of Artificial Sequence: Synthetic oligonucleotide
  Target: APOC3; (+) strand; PAM type: YTN; PAM sequence: TTC
tatgcctccagcgcattctc

SEQ ID NO: 14189 - DNA, 20 bp, Artificial Sequence
  Description of Artificial Sequence: Synthetic oligonucleotide
  Target: APOC3; (+) strand; PAM type: YTN; PAM sequence: CTA
tgcctccagcgcattctcct

SEQ ID NO: 14190 - DNA, 20 bp, Artificial Sequence
  Description of Artificial Sequence: Synthetic oligonucleotide
  Target: APOC3; (+) strand; PAM type: YTN; PAM sequence: CTC
cagcgcattctcctctccga

SEQ ID NO: 14191 - DNA, 20 bp, Artificial Sequence
  Description of Artificial Sequence: Synthetic oligonucleotide
  Target: APOC3; (+) strand; PAM type: YTN; PAM sequence: TTC
tcctctccgaagacagccca

SEQ ID NO: 14192 - DNA, 20 bp, Artificial Sequence
  Description of Artificial Sequence: Synthetic oligonucleotide
  Target: APOC3; (+) strand; PAM type: YTN; PAM sequence: CTC
ctctccgaagacagcccaca

SEQ ID NO: 14193 - DNA, 20 bp, Artificial Sequence
  Description of Artificial Sequence: Synthetic oligonucleotide
  Target: APOC3; (+) strand; PAM type: YTN; PAM sequence: CTC
tccgaagacagcccacagtc

SEQ ID NO: 14194 - DNA, 20 bp, Artificial Sequence
  Description of Artificial Sequence: Synthetic oligonucleotide
  Target: APOC3; (+) strand; PAM type: YTN; PAM sequence: CTC
cgaagacagcccacagtctt

SEQ ID NO: 14195 - DNA, 20 bp, Artificial Sequence
  Description of Artificial Sequence: Synthetic oligonucleotide
  Target: APOC3; (+) strand; PAM type: YTN; PAM sequence: CTT
gctgggcaggagcagaggag

SEQ ID NO: 14196 - DNA, 20 bp, Artificial Sequence
  Description of Artificial Sequence: Synthetic oligonucleotide
  Target: APOC3; (+) strand; PAM type: YTN; PAM sequence: TTG
ctgggcaggagcagaggagg

SEQ ID NO: 14197 - DNA, 20 bp, Artificial Sequence
  Description of Artificial Sequence: Synthetic oligonucleotide
  Target: APOC3; (+) strand; PAM type: YTN; PAM sequence: CTG
ggcaggagcagaggaggtgg

SEQ ID NO: 14198 - DNA, 20 bp, Artificial Sequence
  Description of Artificial Sequence: Synthetic oligonucleotide
  Target: APOC3; (+) strand; PAM type: YTN; PAM sequence: CTT
gctacacttgcaggcacaat

SEQ ID NO: 14199 - DNA, 20 bp, Artificial Sequence
  Description of Artificial Sequence: Synthetic oligonucleotide
  Target: APOC3; (+) strand; PAM type: YTN; PAM sequence: TTG
ctacacttgcaggcacaatg

SEQ ID NO: 14200 - DNA, 20 bp, Artificial Sequence
  Description of Artificial Sequence: Synthetic oligonucleotide
  Target: APOC3; (+) strand; PAM type: YTN; PAM sequence: CTA
cacttgcaggcacaatgtgg

SEQ ID NO: 14201 - DNA, 20 bp, Artificial Sequence
  Description of Artificial Sequence: Synthetic oligonucleotide
  Target: APOC3; (+) strand; PAM type: YTN; PAM sequence: CTT
gcaggcacaatgtggctctg

SEQ ID NO: 14202 - DNA, 20 bp, Artificial Sequence
  Description of Artificial Sequence: Synthetic oligonucleotide
  Target: APOC3; (+) strand; PAM type: YTN; PAM sequence: TTG
caggcacaatgtggctctgt

SEQ ID NO: 14203 - DNA, 20 bp, Artificial Sequence
  Description of Artificial Sequence: Synthetic oligonucleotide
  Target: APOC3; (+) strand; PAM type: YTN; PAM sequence: CTC
tgtgatcacgcatcgggcag

SEQ ID NO: 14204 - DNA, 20 bp, Artificial Sequence
  Description of Artificial Sequence: Synthetic oligonucleotide
  Target: APOC3; (+) strand; PAM type: YTN; PAM sequence: CTG
tgatcacgcatcgggcagcc

SEQ ID NO: 14205 - DNA, 20 bp, Artificial Sequence
  Description of Artificial Sequence: Synthetic oligonucleotide
  Target: APOC3; (+) strand; PAM type: YTN; PAM sequence: CTG
gtctgtcctttgcaggggac

SEQ ID NO: 14206 - DNA, 20 bp, Artificial Sequence
  Description of Artificial Sequence: Synthetic oligonucleotide
  Target: APOC3; (+) strand; PAM type: YTN; PAM sequence: CTG
tcctttgcaggggacatggg

SEQ ID NO: 14207 - DNA, 20 bp, Artificial Sequence
  Description of Artificial Sequence: Synthetic oligonucleotide
  Target: APOC3; (+) strand; PAM type: YTN; PAM sequence: CTT
tgcaggggacatgggctgtg

SEQ ID NO: 14208 - DNA, 20 bp, Artificial Sequence
  Description of Artificial Sequence: Synthetic oligonucleotide
  Target: APOC3; (+) strand; PAM type: YTN; PAM sequence: TTT
gcaggggacatgggctgtga

SEQ ID NO: 14209 - DNA, 20 bp, Artificial Sequence
  Description of Artificial Sequence: Synthetic oligonucleotide
  Target: APOC3; (+) strand; PAM type: YTN; PAM sequence: TTG
caggggacatgggctgtgac

SEQ ID NO: 14210 - DNA, 20 bp, Artificial Sequence
  Description of Artificial Sequence: Synthetic oligonucleotide
  Target: APOC3; (+) strand; PAM type: YTN; PAM sequence: CTG
tgaccctgcctggagatccc

SEQ ID NO: 14211 - DNA, 20 bp, Artificial Sequence
  Description of Artificial Sequence: Synthetic oligonucleotide
  Target: APOC3; (+) strand; PAM type: YTN; PAM sequence: CTG
cctggagatcccattccagt

SEQ ID NO: 14212 - DNA, 20 bp, Artificial Sequence
  Description of Artificial Sequence: Synthetic oligonucleotide
  Target: APOC3; (+) strand; PAM type: YTN; PAM sequence: CTG
gagatcccattccagtttct

SEQ ID NO: 14213 - DNA, 20 bp, Artificial Sequence
  Description of Artificial Sequence: Synthetic oligonucleotide
  Target: APOC3; (+) strand; PAM type: YTN; PAM sequence: TTC
cagtttctccatccagacca

SEQ ID NO: 14214 - DNA, 20 bp, Artificial Sequence
  Description of Artificial Sequence: Synthetic oligonucleotide
  Target: APOC3; (+) strand; PAM type: YTN; PAM sequence: TTT
ctccatccagaccatctgtg

SEQ ID NO: 14215 - DNA, 20 bp, Artificial Sequence
  Description of Artificial Sequence: Synthetic oligonucleotide
  Target: APOC3; (+) strand; PAM type: YTN; PAM sequence: TTC
tccatccagaccatctgtgg

SEQ ID NO: 14216 - DNA, 20 bp, Artificial Sequence
  Description of Artificial Sequence: Synthetic oligonucleotide
  Target: APOC3; (+) strand; PAM type: YTN; PAM sequence: CTC
catccagaccatctgtgggg

SEQ ID NO: 14217 - DNA, 20 bp, Artificial Sequence
  Description of Artificial Sequence: Synthetic oligonucleotide
  Target: APOC3; (+) strand; PAM type: YTN; PAM sequence: CTG
tggggcccagctcatcagat

SEQ ID NO: 14218 - DNA, 20 bp, Artificial Sequence
  Description of Artificial Sequence: Synthetic oligonucleotide
  Target: APOC3; (+) strand; PAM type: YTN; PAM sequence: CTC
atcagatattaggtgaggac

SEQ ID NO: 14219 - DNA, 20 bp, Artificial Sequence
  Description of Artificial Sequence: Synthetic oligonucleotide
  Target: APOC3; (+) strand; PAM type: YTN; PAM sequence: TTA
ggtgaggactcggccagtct

SEQ ID NO: 14220 - DNA, 20 bp, Artificial Sequence
  Description of Artificial Sequence: Synthetic oligonucleotide
  Target: APOC3; (+) strand; PAM type: YTN; PAM sequence: CTC
ggccagtctggcttcaacat

SEQ ID NO: 14221 - DNA, 20 bp, Artificial Sequence
  Description of Artificial Sequence: Synthetic oligonucleotide
  Target: APOC3; (+) strand; PAM type: YTN; PAM sequence: CTG
gcttcaacatcatcccacag

SEQ ID NO: 14222 - DNA, 20 bp, Artificial Sequence
  Description of Artificial Sequence: Synthetic oligonucleotide
  Target: APOC3; (+) strand; PAM type: YTN; PAM sequence: CTT
caacatcatcccacaggcct

SEQ ID NO: 14223 - DNA, 20 bp, Artificial Sequence
  Description of Artificial Sequence: Synthetic oligonucleotide
  Target: APOC3; (+) strand; PAM type: YTN; PAM sequence: TTC
aacatcatcccacaggcctc

SEQ ID NO: 14224 - DNA, 20 bp, Artificial Sequence
  Description of Artificial Sequence: Synthetic oligonucleotide
  Target: APOC3; (+) strand; PAM type: YTN; PAM sequence: CTC
tgccccctacccctgccctc

SEQ ID NO: 14225 - DNA, 20 bp, Artificial Sequence
  Description of Artificial Sequence: Synthetic oligonucleotide
  Target: APOC3; (+) strand; PAM type: YTN; PAM sequence: CTG
ccccctacccctgccctcaa

SEQ ID NO: 14226 - DNA, 20 bp, Artificial Sequence
  Description of Artificial Sequence: Synthetic oligonucleotide
  Target: APOC3; (+) strand; PAM type: YTN; PAM sequence: CTA
cccctgccctcaaccccagg

SEQ ID NO: 14227 - DNA, 20 bp, Artificial Sequence
  Description of Artificial Sequence: Synthetic oligonucleotide
  Target: APOC3; (+) strand; PAM type: YTN; PAM sequence: CTG
ccctcaaccccaggctgggt

SEQ ID NO: 14228 - DNA, 20 bp, Artificial Sequence
  Description of Artificial Sequence: Synthetic oligonucleotide
  Target: APOC3; (+) strand; PAM type: YTN; PAM sequence: CTC
aaccccaggctgggtcctta

SEQ ID NO: 14229 - DNA, 20 bp, Artificial Sequence
  Description of Artificial Sequence: Synthetic oligonucleotide
  Target: APOC3; (+) strand; PAM type: YTN; PAM sequence: CTG
ggtccttactttagctgttt

SEQ ID NO: 14230 - DNA, 20 bp, Artificial Sequence
  Description of Artificial Sequence: Synthetic oligonucleotide
  Target: APOC3; (+) strand; PAM type: YTN; PAM sequence: CTT
actttagctgttttcccaag

SEQ ID NO: 14231 - DNA, 20 bp, Artificial Sequence
  Description of Artificial Sequence: Synthetic oligonucleotide
  Target: APOC3; (+) strand; PAM type: YTN; PAM sequence: TTA
ctttagctgttttcccaagg

SEQ ID NO: 14232 - DNA, 20 bp, Artificial Sequence
  Description of Artificial Sequence: Synthetic oligonucleotide
  Target: APOC3; (+) strand; PAM type: YTN; PAM sequence: CTT
tagctgttttcccaaggcgg

SEQ ID NO: 14233 - DNA, 20 bp, Artificial Sequence
  Description of Artificial Sequence: Synthetic oligonucleotide
  Target: APOC3; (+) strand; PAM type: YTN; PAM sequence: TTT
agctgttttcccaaggcgga

SEQ ID NO: 14234 - DNA, 20 bp, Artificial Sequence
  Description of Artificial Sequence: Synthetic oligonucleotide
  Target: APOC3; (+) strand; PAM type: YTN; PAM sequence: TTA
gctgttttcccaaggcggag

SEQ ID NO: 14235 - DNA, 20 bp, Artificial Sequence
  Description of Artificial Sequence: Synthetic oligonucleotide
  Target: APOC3; (+) strand; PAM type: YTN; PAM sequence: CTG
ttttcccaaggcggagcctt

SEQ ID NO: 14236 - DNA, 20 bp, Artificial Sequence
  Description of Artificial Sequence: Synthetic oligonucleotide
  Target: APOC3; (+) strand; PAM type: YTN; PAM sequence: TTT
tcccaaggcggagccttcaa

SEQ ID NO: 14237 - DNA, 20 bp, Artificial Sequence
  Description of Artificial Sequence: Synthetic oligonucleotide
  Target: APOC3; (+) strand; PAM type: YTN; PAM sequence: TTT
cccaaggcggagccttcaaa

SEQ ID NO: 14238 - DNA, 20 bp, Artificial Sequence
  Description of Artificial Sequence: Synthetic oligonucleotide
  Target: APOC3; (+) strand; PAM type: YTN; PAM sequence: TTC
ccaaggcggagccttcaaac

SEQ ID NO: 14239 - DNA, 20 bp, Artificial Sequence
  Description of Artificial Sequence: Synthetic oligonucleotide
  Target: APOC3; (+) strand; PAM type: YTN; PAM sequence: CTT
caaactgggacacatagtct

SEQ ID NO: 14240 - DNA, 20 bp, Artificial Sequence
  Description of Artificial Sequence: Synthetic oligonucleotide
  Target: APOC3; (+) strand; PAM type: YTN; PAM sequence: TTC
aaactgggacacatagtctc

SEQ ID NO: 14241 - DNA, 20 bp, Artificial Sequence
  Description of Artificial Sequence: Synthetic oligonucleotide
  Target: APOC3; (+) strand; PAM type: YTN; PAM sequence: CTG
ggacacatagtctctgccgc

SEQ ID NO: 14242 - DNA, 20 bp, Artificial Sequence
  Description of Artificial Sequence: Synthetic oligonucleotide
  Target: APOC3; (+) strand; PAM type: YTN; PAM sequence: CTC
tgccgctgtctttgagcaca

SEQ ID NO: 14243 - DNA, 20 bp, Artificial Sequence
  Description of Artificial Sequence: Synthetic oligonucleotide
  Target: APOC3; (+) strand; PAM type: YTN; PAM sequence: CTG
ccgctgtctttgagcacatc

SEQ ID NO: 14244 - DNA, 20 bp, Artificial Sequence
  Description of Artificial Sequence: Synthetic oligonucleotide
  Target: APOC3; (+) strand; PAM type: YTN; PAM sequence: CTG
tctttgagcacatccacgta

SEQ ID NO: 14245 - DNA, 20 bp, Artificial Sequence
  Description of Artificial Sequence: Synthetic oligonucleotide
  Target: APOC3; (+) strand; PAM type: YTN; PAM sequence: CTT
tgagcacatccacgtacaca

SEQ ID NO: 14246 - DNA, 20 bp, Artificial Sequence
  Description of Artificial Sequence: Synthetic oligonucleotide
  Target: APOC3; (+) strand; PAM type: YTN; PAM sequence: TTT
gagcacatccacgtacacag

SEQ ID NO: 14247 - DNA, 20 bp, Artificial Sequence
  Description of Artificial Sequence: Synthetic oligonucleotide
  Target: APOC3; (+) strand; PAM type: YTN; PAM sequence: TTG
agcacatccacgtacacagt

SEQ ID NO: 14248 - DNA, 20 bp, Artificial Sequence
  Description of Artificial Sequence: Synthetic oligonucleotide
  Target: APOC3; (+) strand; PAM type: YTN; PAM sequence: CTT
cactcgatcccaggggctct

SEQ ID NO: 14249 - DNA, 20 bp, Artificial Sequence
  Description of Artificial Sequence: Synthetic oligonucleotide
  Target: APOC3; (+) strand; PAM type: YTN; PAM sequence: TTC
actcgatcccaggggctctg

SEQ ID NO: 14250 - DNA, 20 bp, Artificial Sequence
  Description of Artificial Sequence: Synthetic oligonucleotide
  Target: APOC3; (+) strand; PAM type: YTN; PAM sequence: CTC
gatcccaggggctctggggg

SEQ ID NO: 14251 - DNA, 20 bp, Artificial Sequence
  Description of Artificial Sequence: Synthetic oligonucleotide
  Target: APOC3; (+) strand; PAM type: YTN; PAM sequence: CTC
tgggggggttcatcttgctg

SEQ ID NO: 14252 - DNA, 20 bp, Artificial Sequence
  Description of Artificial Sequence: Synthetic oligonucleotide
  Target: APOC3; (+) strand; PAM type: YTN; PAM sequence: CTG
ggggggttcatcttgctgcc

SEQ ID NO: 14253 - DNA, 20 bp, Artificial Sequence
  Description of Artificial Sequence: Synthetic oligonucleotide
  Target: APOC3; (+) strand; PAM type: YTN; PAM sequence: TTC
atcttgctgccagaaatgcc

SEQ ID NO: 14254 - DNA, 20 bp, Artificial Sequence
  Description of Artificial Sequence: Synthetic oligonucleotide
  Target: APOC3; (+) strand; PAM type: YTN; PAM sequence: CTT
gctgccagaaatgccgagcc

SEQ ID NO: 14255 - DNA, 20 bp, Artificial Sequence
  Description of Artificial Sequence: Synthetic oligonucleotide
  Target: APOC3; (+) strand; PAM type: YTN; PAM sequence: TTG
ctgccagaaatgccgagcct

SEQ ID NO: 14256 - DNA, 20 bp, Artificial Sequence
  Description of Artificial Sequence: Synthetic oligonucleotide
  Target: APOC3; (+) strand; PAM type: YTN; PAM sequence: CTG
ccagaaatgccgagcctggc

SEQ ID NO: 14257 - DNA, 20 bp, Artificial Sequence
  Description of Artificial Sequence: Synthetic oligonucleotide
  Target: APOC3; (+) strand; PAM type: YTN; PAM sequence: CTG
gctccctgagggtgggaggg

SEQ ID NO: 14258 - DNA, 20 bp, Artificial Sequence
  Description of Artificial Sequence: Synthetic oligonucleotide
  Target: APOC3; (+) strand; PAM type: YTN; PAM sequence: CTC
cctgagggtgggaggggaga

SEQ ID NO: 14259 - DNA, 20 bp, Artificial Sequence
  Description of Artificial Sequence: Synthetic oligonucleotide
  Target: APOC3; (+) strand; PAM type: YTN; PAM sequence: CTG
agggtgggaggggagaccca

SEQ ID NO: 14260 - DNA, 20 bp, Artificial Sequence
  Description of Artificial Sequence: Synthetic oligonucleotide
  Target: APOC3; (+) strand; PAM type: YTN; PAM sequence: CTG
tgggctgagatctgagccga

SEQ ID NO: 14261 - DNA, 20 bp, Artificial Sequence
  Description of Artificial Sequence: Synthetic oligonucleotide
  Target: APOC3; (+) strand; PAM type: YTN; PAM sequence: CTG
agatctgagccgaaaggcca

SEQ ID NO: 14262 - DNA, 20 bp, Artificial Sequence
  Description of Artificial Sequence: Synthetic oligonucleotide
  Target: APOC3; (+) strand; PAM type: YTN; PAM sequence: CTG
agccgaaaggccaagcttgg

SEQ ID NO: 14263 - DNA, 20 bp, Artificial Sequence
  Description of Artificial Sequence: Synthetic oligonucleotide
  Target: APOC3; (+) strand; PAM type: YTN; PAM sequence: CTT
ggaggtgggggagagggggc

SEQ ID NO: 14264 - DNA, 20 bp, Artificial Sequence
  Description of Artificial Sequence: Synthetic oligonucleotide
  Target: APOC3; (+) strand; PAM type: YTN; PAM sequence: TTG
gaggtgggggagagggggcc

SEQ ID NO: 14265 - DNA, 20 bp, Artificial Sequence
  Description of Artificial Sequence: Synthetic oligonucleotide
  Target: APOC3; (+) strand; PAM type: YTN; PAM sequence: CTG
ctgcctctgcccaggagggt

SEQ ID NO: 14266 - DNA, 20 bp, Artificial Sequence
  Description of Artificial Sequence: Synthetic oligonucleotide
  Target: APOC3; (+) strand; PAM type: YTN; PAM sequence: CTG
cctctgcccaggagggtggg

SEQ ID NO: 14267 - DNA, 20 bp, Artificial Sequence
  Description of Artificial Sequence: Synthetic oligonucleotide
  Target: APOC3; (+) strand; PAM type: YTN; PAM sequence: CTC
tgcccaggagggtgggccac

SEQ ID NO: 14268 - DNA, 20 bp, Artificial Sequence
  Description of Artificial Sequence: Synthetic oligonucleotide
  Target: APOC3; (+) strand; PAM type: YTN; PAM sequence: CTG
cccaggagggtgggccacgg

SEQ ID NO: 14269 - DNA, 20 bp, Artificial Sequence
  Description of Artificial Sequence: Synthetic oligonucleotide
  Target: APOC3; (+) strand; PAM type: YTN; PAM sequence: TTT
agggagaaagccccccgatg

SEQ ID NO: 14270 - DNA, 20 bp, Artificial Sequence
  Description of Artificial Sequence: Synthetic oligonucleotide
  Target: APOC3; (+) strand; PAM type: YTN; PAM sequence: TTA
gggagaaagccccccgatgg

SEQ ID NO: 14271 - DNA, 20 bp, Artificial Sequence
  Description of Artificial Sequence: Synthetic oligonucleotide
  Target: APOC3; (+) strand; PAM type: YTN; PAM sequence: TTG
gctccctaggttaggggaca

SEQ ID NO: 14272 - DNA, 20 bp, Artificial Sequence
  Description of Artificial Sequence: Synthetic oligonucleotide
  Target: APOC3; (+) strand; PAM type: YTN; PAM sequence: CTC
cctaggttaggggacaccta

SEQ ID NO: 14273 - DNA, 20 bp, Artificial Sequence
  Description of Artificial Sequence: Synthetic oligonucleotide
  Target: APOC3; (+) strand; PAM type: YTN; PAM sequence: CTA
ggttaggggacacctacccg

SEQ ID NO: 14274 - DNA, 20 bp, Artificial Sequence
  Description of Artificial Sequence: Synthetic oligonucleotide
  Target: APOC3; (+) strand; PAM type: YTN; PAM sequence: TTA
ggggacacctacccgtcagg

SEQ ID NO: 14275 - DNA, 20 bp, Artificial Sequence
  Description of Artificial Sequence: Synthetic oligonucleotide
  Target: APOC3; (+) strand; PAM type: YTN; PAM sequence: CTA
cccgtcaggaagagcacggc

SEQ ID NO: 14276 - DNA, 20 bp, Artificial Sequence
  Description of Artificial Sequence: Synthetic oligonucleotide
  Target: APOC3; (+) strand; PAM type: YTN; PAM sequence: CTT
tcatcctgaagggccgtggg

SEQ ID NO: 14277 - DNA, 20 bp, Artificial Sequence
  Description of Artificial Sequence: Synthetic oligonucleotide
  Target: APOC3; (+) strand; PAM type: YTN; PAM sequence: TTT
catcctgaagggccgtgggg

SEQ ID NO: 14278 - DNA, 20 bp, Artificial Sequence
  Description of Artificial Sequence: Synthetic oligonucleotide
  Target: APOC3; (+) strand; PAM type: YTN; PAM sequence: TTC
atcctgaagggccgtggggg

SEQ ID NO: 14279 - DNA, 20 bp, Artificial Sequence
  Description of Artificial Sequence: Synthetic oligonucleotide
  Target: APOC3; (+) strand; PAM type: YTN; PAM sequence: CTG
aagggccgtgggggacctgg

SEQ ID NO: 14280 - DNA, 20 bp, Artificial Sequence
  Description of Artificial Sequence: Synthetic oligonucleotide
  Target: APOC3; (+) strand; PAM type: YTN; PAM sequence: CTG
gaggagaagaagggcctggc

SEQ ID NO: 14281 - DNA, 20 bp, Artificial Sequence
  Description of Artificial Sequence: Synthetic oligonucleotide
  Target: APOC3; (+) strand; PAM type: YTN; PAM sequence: CTG
gctgagtggggtgccttcag

SEQ ID NO: 14282 - DNA, 20 bp, Artificial Sequence
  Description of Artificial Sequence: Synthetic oligonucleotide
  Target: APOC3; (+) strand; PAM type: YTN; PAM sequence: CTG
agtggggtgccttcagcatg

SEQ ID NO: 14283 - DNA, 20 bp, Artificial Sequence
  Description of Artificial Sequence: Synthetic oligonucleotide
  Target: APOC3; (+) strand; PAM type: YTN; PAM sequence: CTT
cagcatgcagaagccccgtg

SEQ ID NO: 14284 - DNA, 20 bp, Artificial Sequence
  Description of Artificial Sequence: Synthetic oligonucleotide
  Target: APOC3; (+) strand; PAM type: YTN; PAM sequence: TTC
agcatgcagaagccccgtgc

SEQ ID NO: 14285 - DNA, 20 bp, Artificial Sequence
  Description of Artificial Sequence: Synthetic oligonucleotide
  Target: APOC3; (+) strand; PAM type: YTN; PAM sequence: CTC
ccccactcattgcagccagg

SEQ ID NO: 14286 - DNA, 20 bp, Artificial Sequence
  Description of Artificial Sequence: Synthetic oligonucleotide
  Target: APOC3; (+) strand; PAM type: YTN; PAM sequence: CTC
attgcagccaggtgaggaga

SEQ ID NO: 14287 - DNA, 20 bp, Artificial Sequence
  Description of Artificial Sequence: Synthetic oligonucleotide
  Target: APOC3; (+) strand; PAM type: YTN; PAM sequence: TTG
cagccaggtgaggagaaggg

SEQ ID NO: 14288 - DNA, 20 bp, Artificial Sequence
  Description of Artificial Sequence: Synthetic oligonucleotide
  Target: APOC3; (+) strand; PAM type: YTN; PAM sequence: CTC
aggtacccagaggcccggcc

SEQ ID NO: 14289 - DNA, 20 bp, Artificial Sequence
  Description of Artificial Sequence: Synthetic oligonucleotide
  Target: APOC3; (+) strand; PAM type: YTN; PAM sequence: CTG
gggcaaggcctgaaccttga

SEQ ID NO: 14290 - DNA, 20 bp, Artificial Sequence
  Description of Artificial Sequence: Synthetic oligonucleotide
  Target: APOC3; (+) strand; PAM type: YTN; PAM sequence: CTG
aaccttgagctggggagcca

SEQ ID NO: 14291 - DNA, 20 bp, Artificial Sequence
  Description of Artificial Sequence: Synthetic oligonucleotide
  Target: APOC3; (+) strand; PAM type: YTN; PAM sequence: CTT
gagctggggagccagagtga

SEQ ID NO: 14292 - DNA, 20 bp, Artificial Sequence
  Description of Artificial Sequence: Synthetic oligonucleotide
  Target: APOC3; (+) strand; PAM type: YTN; PAM sequence: TTG
agctggggagccagagtgac

SEQ ID NO: 14293 - DNA, 20 bp, Artificial Sequence
  Description of Artificial Sequence: Synthetic oligonucleotide
  Target: APOC3; (+) strand; PAM type: YTN; PAM sequence: CTG
gggagccagagtgaccgggg

SEQ ID NO: 14294 - DNA, 20 bp, Artificial Sequence
  Description of Artificial Sequence: Synthetic oligonucleotide
  Target: APOC3; (+) strand; PAM type: YTN; PAM sequence: CTC
cttctcgcagtctctaagca

SEQ ID NO: 14295 - DNA, 20 bp, Artificial Sequence
  Description of Artificial Sequence: Synthetic oligonucleotide
  Target: APOC3; (+) strand; PAM type: YTN; PAM sequence: CTT
ctcgcagtctctaagcagcc

SEQ ID NO: 14296 - DNA, 20 bp, Artificial Sequence
  Description of Artificial Sequence: Synthetic oligonucleotide
  Target: APOC3; (+) strand; PAM type: YTN; PAM sequence: TTC
tcgcagtctctaagcagcca

SEQ ID NO: 14297 - DNA, 20 bp, Artificial Sequence
  Description of Artificial Sequence: Synthetic oligonucleotide
  Target: APOC3; (+) strand; PAM type: YTN; PAM sequence: CTC
gcagtctctaagcagccagc

SEQ ID NO: 14298 - DNA, 20 bp, Artificial Sequence
  Description of Artificial Sequence: Synthetic oligonucleotide
  Target: APOC3; (+) strand; PAM type: YTN; PAM sequence: CTC
taagcagccagctcttgcag

SEQ ID NO: 14299 - DNA, 20 bp, Artificial Sequence
  Description of Artificial Sequence: Synthetic oligonucleotide
  Target: APOC3; (+) strand; PAM type: YTN; PAM sequence: CTA
agcagccagctcttgcaggg

SEQ ID NO: 14300 - DNA, 20 bp, Artificial Sequence
  Description of Artificial Sequence: Synthetic oligonucleotide
  Target: APOC3; (+) strand; PAM type: YTN; PAM sequence: CTC
ttgcagggcctatttatgtc

SEQ ID NO: 14301 - DNA, 20 bp, Artificial Sequence
  Description of Artificial Sequence: Synthetic oligonucleotide
  Target: APOC3; (+) strand; PAM type: YTN; PAM sequence: CTT
gcagggcctatttatgtctg

SEQ ID NO: 14302 - DNA, 20 bp, Artificial Sequence
  Description of Artificial Sequence: Synthetic oligonucleotide
  Target: APOC3; (+) strand; PAM type: YTN; PAM sequence: TTG
cagggcctatttatgtctgc

SEQ ID NO: 14303 - DNA, 20 bp, Artificial Sequence
  Description of Artificial Sequence: Synthetic oligonucleotide
  Target: APOC3; (+) strand; PAM type: YTN; PAM sequence: CTA
tttatgtctgcagccagggt

SEQ ID NO: 14304 - DNA, 20 bp, Artificial Sequence
  Description of Artificial Sequence: Synthetic oligonucleotide
  Target: APOC3; (+) strand; PAM type: YTN; PAM sequence: TTT
atgtctgcagccagggtctg

SEQ ID NO: 14305 - DNA, 20 bp, Artificial Sequence
  Description of Artificial Sequence: Synthetic oligonucleotide
  Target: APOC3; (+) strand; PAM type: YTN; PAM sequence: TTA
tgtctgcagccagggtctgg

SEQ ID NO: 14306 - DNA, 20 bp, Artificial Sequence
  Description of Artificial Sequence: Synthetic oligonucleotide
  Target: APOC3; (+) strand; PAM type: YTN; PAM sequence: CTG
cagccagggtctgggctggg

SEQ ID NO: 14307 - DNA, 20 bp, Artificial Sequence
  Description of Artificial Sequence: Synthetic oligonucleotide
  Target: APOC3; (+) strand; PAM type: YTN; PAM sequence: CTG
ggctgggaggctgataagcc

SEQ ID NO: 14308 - DNA, 20 bp, Artificial Sequence
  Description of Artificial Sequence: Synthetic oligonucleotide
  Target: APOC3; (+) strand; PAM type: YTN; PAM sequence: CTG
ggaggctgataagcccagcc

SEQ ID NO: 14309 - DNA, 20 bp, Artificial Sequence
  Description of Artificial Sequence: Synthetic oligonucleotide
  Target: APOC3; (+) strand; PAM type: YTN; PAM sequence: CTG
ataagcccagccccggccct

SEQ ID NO: 14310 - DNA, 20 bp, Artificial Sequence
  Description of Artificial Sequence: Synthetic oligonucleotide
  Target: APOC3; (+) strand; PAM type: YTN; PAM sequence: CTG
ttgctgctcactggtcctgg

SEQ ID NO: 14311 - DNA, 20 bp, Artificial Sequence
  Description of Artificial Sequence: Synthetic oligonucleotide
  Target: APOC3; (+) strand; PAM type: YTN; PAM sequence: TTG
ctgctcactggtcctggcaa

SEQ ID NO: 14312 - DNA, 20 bp, Artificial Sequence
  Description of Artificial Sequence: Synthetic oligonucleotide
  Target: APOC3; (+) strand; PAM type: YTN; PAM sequence: CTG
ctcactggtcctggcaatgt

SEQ ID NO: 14313 - DNA, 20 bp, Artificial Sequence
  Description of Artificial Sequence: Synthetic oligonucleotide
  Target: APOC3; (+) strand; PAM type: YTN; PAM sequence: CTC
actggtcctggcaatgtgga

SEQ ID NO: 14314 - DNA, 20 bp, Artificial Sequence
  Description of Artificial Sequence: Synthetic oligonucleotide
  Target: APOC3; (+) strand; PAM type: YTN; PAM sequence: CTG
gtcctggcaatgtggaactt

SEQ ID NO: 14315 - DNA, 20 bp, Artificial Sequence
  Description of Artificial Sequence: Synthetic oligonucleotide
  Target: APOC3; (+) strand; PAM type: YTN; PAM sequence: CTG
gcaatgtggaacttaagagt

SEQ ID NO: 14316 - DNA, 20 bp, Artificial Sequence
  Description of Artificial Sequence: Synthetic oligonucleotide
  Target: APOC3; (+) strand; PAM type: YTN; PAM sequence: CTT
aagagttcaaggatcagctc

SEQ ID NO: 14317 - DNA, 20 bp, Artificial Sequence
  Description of Artificial Sequence: Synthetic oligonucleotide
  Target: APOC3; (+) strand; PAM type: YTN; PAM sequence: TTA
agagttcaaggatcagctct

SEQ ID NO: 14318 - DNA, 20 bp, Artificial Sequence
  Description of Artificial Sequence: Synthetic oligonucleotide
  Target: APOC3; (+) strand; PAM type: YTN; PAM sequence: TTC
aaggatcagctctgtccctg

SEQ ID NO: 14319 - DNA, 20 bp, Artificial Sequence
  Description of Artificial Sequence: Synthetic oligonucleotide
  Target: APOC3; (+) strand; PAM type: YTN; PAM sequence: CTC
tgtccctggggctgggcaaa

SEQ ID NO: 14320 - DNA, 20 bp, Artificial Sequence
  Description of Artificial Sequence: Synthetic oligonucleotide
  Target: APOC3; (+) strand; PAM type: YTN; PAM sequence: CTG
tccctggggctgggcaaata

SEQ ID NO: 14321 - DNA, 20 bp, Artificial Sequence
  Description of Artificial Sequence: Synthetic oligonucleotide
  Target: APOC3; (+) strand; PAM type: YTN; PAM sequence: CTG
gggctgggcaaatagagtgg

SEQ ID NO: 14322 - DNA, 20 bp, Artificial Sequence
  Description of Artificial Sequence: Synthetic oligonucleotide
  Target: APOC3; (+) strand; PAM type: YTN; PAM sequence: CTG
ggcaaatagagtgggcaaac

SEQ ID NO: 14323 - DNA, 20 bp, Artificial Sequence
  Description of Artificial Sequence: Synthetic oligonucleotide
  Target: APOC3; (+) strand; PAM type: YTN; PAM sequence: CTG
cgggggctgcagggcagggg

SEQ ID NO: 14324 - DNA, 20 bp, Artificial Sequence
  Description of Artificial Sequence: Synthetic oligonucleotide
  Target: APOC3; (+) strand; PAM type: YTN; PAM sequence: CTG
cagggcaggggtcaagggtt

SEQ ID NO: 14325 - DNA, 20 bp, Artificial Sequence
  Description of Artificial Sequence: Synthetic oligonucleotide
  Target: APOC3; (+) strand; PAM type: YTN; PAM sequence: TTC
agtgggggcgggaggggagt

SEQ ID NO: 14326 - DNA, 20 bp, Artificial Sequence
  Description of Artificial Sequence: Synthetic oligonucleotide
  Target: APOC3; (+) strand; PAM type: YTN; PAM sequence: CTG
caggcttgcaggtctcccgg

SEQ ID NO: 14327 - DNA, 20 bp, Artificial Sequence
  Description of Artificial Sequence: Synthetic oligonucleotide
  Target: APOC3; (+) strand; PAM type: YTN; PAM sequence: CTT
gcaggtctcccgggtggggt

SEQ ID NO: 14328 - DNA, 20 bp, Artificial Sequence
  Description of Artificial Sequence: Synthetic oligonucleotide
  Target: APOC3; (+) strand; PAM type: YTN; PAM sequence: TTG
caggtctcccgggtggggtc

SEQ ID NO: 14329 - DNA, 20 bp, Artificial Sequence
  Description of Artificial Sequence: Synthetic oligonucleotide
  Target: APOC3; (+) strand; PAM type: YTN; PAM sequence: CTC
ccgggtggggtcggggttcc

SEQ ID NO: 14330 - DNA, 20 bp, Artificial Sequence
  Description of Artificial Sequence: Synthetic oligonucleotide
  Target: APOC3; (+) strand; PAM type: YTN; PAM sequence: TTC
cctgcactcatccccttccc

SEQ ID NO: 14331 - DNA, 20 bp, Artificial Sequence
  Description of Artificial Sequence: Synthetic oligonucleotide
  Target: APOC3; (+) strand; PAM type: YTN; PAM sequence: CTG
cactcatccccttcccctcc

SEQ ID NO: 14332 - DNA, 20 bp, Artificial Sequence
  Description of Artificial Sequence: Synthetic oligonucleotide
  Target: APOC3; (+) strand; PAM type: YTN; PAM sequence: CTC
atccccttcccctccatggg

SEQ ID NO: 14333 - DNA, 20 bp, Artificial Sequence
  Description of Artificial Sequence: Synthetic oligonucleotide
  Target: APOC3; (+) strand; PAM type: YTN; PAM sequence: CTT
cccctccatgggagtgtgtg

SEQ ID NO: 14334 - DNA, 20 bp, Artificial Sequence
  Description of Artificial Sequence: Synthetic oligonucleotide
  Target: APOC3; (+) strand; PAM type: YTN; PAM sequence: TTC
ccctccatgggagtgtgtgg

SEQ ID NO: 14335 - DNA, 20 bp, Artificial Sequence
  Description of Artificial Sequence: Synthetic oligonucleotide
  Target: APOC3; (+) strand; PAM type: YTN; PAM sequence: CTC
catgggagtgtgtgggcagt

SEQ ID NO: 14336 - DNA, 20 bp, Artificial Sequence
  Description of Artificial Sequence: Synthetic oligonucleotide
  Target: APOC3; (+) strand; PAM type: YTN; PAM sequence: TTG
ccattgtccattgtgttggc

SEQ ID NO: 14337 - DNA, 20 bp, Artificial Sequence
  Description of Artificial Sequence: Synthetic oligonucleotide
  Target: APOC3; (+) strand; PAM type: YTN; PAM sequence: TTG
tccattgtgttggcagagga

SEQ ID NO: 14338 - DNA, 20 bp, Artificial Sequence
  Description of Artificial Sequence: Synthetic oligonucleotide
  Target: APOC3; (+) strand; PAM type: YTN; PAM sequence: TTG
tgttggcagaggaggggagg

SEQ ID NO: 14339 - DNA, 20 bp, Artificial Sequence
  Description of Artificial Sequence: Synthetic oligonucleotide
  Target: APOC3; (+) strand; PAM type: YTN; PAM sequence: TTG
gcagaggaggggaggggagg

SEQ ID NO: 14340 - DNA, 20 bp, Artificial Sequence
  Description of Artificial Sequence: Synthetic oligonucleotide
  Target: APOC3; (+) strand; PAM type: YTN; PAM sequence: CTG
ggactcctccaccaaggaga

SEQ ID NO: 14341 - DNA, 20 bp, Artificial Sequence
  Description of Artificial Sequence: Synthetic oligonucleotide
  Target: APOC3; (+) strand; PAM type: YTN; PAM sequence: CTC
ctccaccaaggagactgcct

SEQ ID NO: 14342 - DNA, 20 bp, Artificial Sequence
  Description of Artificial Sequence: Synthetic oligonucleotide
  Target: APOC3; (+) strand; PAM type: YTN; PAM sequence: CTC
caccaaggagactgcctccc

SEQ ID NO: 14343 - DNA, 20 bp, Artificial Sequence
  Description of Artificial Sequence: Synthetic oligonucleotide
  Target: APOC3; (+) strand; PAM type: YTN; PAM sequence: CTG
cctcccccaccaccagcatt

SEQ ID NO: 14344 - DNA, 20 bp, Artificial Sequence
  Description of Artificial Sequence: Synthetic oligonucleotide
  Target: APOC3; (+) strand; PAM type: YTN; PAM sequence: CTC
ccccaccaccagcattccag

SEQ ID NO: 14345 - DNA, 20 bp, Artificial Sequence
  Description of Artificial Sequence: Synthetic oligonucleotide
  Target: APOC3; (+) strand; PAM type: YTN; PAM sequence: TTC
cagggagactacttcactcc

SEQ ID NO: 14346 - DNA, 20 bp, Artificial Sequence
  Description of Artificial Sequence: Synthetic oligonucleotide
  Target: APOC3; (+) strand; PAM type: YTN; PAM sequence: CTA
cttcactcccctcccccttc

SEQ ID NO: 14347 - DNA, 20 bp, Artificial Sequence
  Description of Artificial Sequence: Synthetic oligonucleotide
  Target: APOC3; (+) strand; PAM type: YTN; PAM sequence: CTT
cactcccctcccccttcccc

SEQ ID NO: 14348 - DNA, 20 bp, Artificial Sequence
  Description of Artificial Sequence: Synthetic oligonucleotide
  Target: APOC3; (+) strand; PAM type: YTN; PAM sequence: TTC
actcccctcccccttccccc

SEQ ID NO: 14349 - DNA, 20 bp, Artificial Sequence
  Description of Artificial Sequence: Synthetic oligonucleotide
  Target: APOC3; (+) strand; PAM type: YTN; PAM sequence: CTC
ccctcccccttcccccgccc

SEQ ID NO: 14350 - DNA, 20 bp, Artificial Sequence
  Description of Artificial Sequence: Synthetic oligonucleotide
  Target: APOC3; (+) strand; PAM type: YTN; PAM sequence: CTC
ccccttcccccgccctgtcc

SEQ ID NO: 14351-14380 - skipped (30 entries)

SEQ ID NO: 14381 - DNA, 23 bp, Artificial Sequence
  Description of Artificial Sequence: Synthetic oligonucleotide
  modified_base (1)..(21): a, c, t, g, unknown or other
nnnnnnnnnnnnnnnnnnnnnrg

SEQ ID NO: 14382 - DNA, 100 bp, Artificial Sequence
  Description of Artificial Sequence: Synthetic oligonucleotide
  modified_base (1)..(20): a, c, t, g, unknown or other
nnnnnnnnnnnnnnnnnnnnguuuuagagcuagaaauagcaaguuaaaauaaggcuaguccguuaucaacuugaaaaaguggcaccgagucggugcuuuu

SEQ ID NO: 14383 - DNA, 96 bp, Artificial Sequence
  Description of Artificial Sequence: Synthetic oligonucleotide
  modified_base (1)..(20): a, c, t, g, unknown or other
nnnnnnnnnnnnnnnnnnnnguuuuagagcuagaaauagcaaguuaaaauaaggcuaguccguuaucaacuugaaaaaguggcaccgagucggugc

SEQ ID NO: 14384 - DNA, 78 bp, Artificial Sequence
  Description of Artificial Sequence: Synthetic oligonucleotide
  modified_base (1)..(1): a, c, t, g, unknown or other
nguuuuagagcuagaaauagcaaguuaaaauaaggcuaguccguuaucaacuugaaaaaguggcaccgagucggugcu

SEQ ID NO: 14385 - protein, 4 aa, Artificial Sequence
  Description of Artificial Sequence: Synthetic polypeptide
  misc_feature (1)..(3): Xaa is any purine
  misc_feature (4)..(4): Xaa is any amino acid
XXXX
